United States Patent Application Publication US 2004/0265230 A1 - sequence listing, part 2

SEQ ID NO: 38404 - DNA, 21 bp, homo sapiens
cagttcctgctgttcctgtcc

SEQ ID NO: 38405 - RNA, 21 nt, RNAi
guuccugcuguuccuguccuu

SEQ ID NO: 38406 - RNA, 21 nt, RNAi
uucaaggacgacaaggacagg

SEQ ID NO: 38407 - DNA, 21 bp, homo sapiens
cagaagtctggcacatcaggt

SEQ ID NO: 38408 - RNA, 21 nt, RNAi
gaagucuggcacaucagguuu

SEQ ID NO: 38409 - RNA, 21 nt, RNAi
uucuucagaccguguagucca

SEQ ID NO: 38410 - DNA, 21 bp, homo sapiens
cagttatgtgacctaaatgca

SEQ ID NO: 38411 - RNA, 21 nt, RNAi
guuaugugaccuaaaugcauu

SEQ ID NO: 38412 - RNA, 21 nt, RNAi
uucaauacacuggauuuacgu

SEQ ID NO: 38413 - DNA, 21 bp, homo sapiens
caaacgttggaccaagagaac

SEQ ID NO: 38414 - RNA, 21 nt, RNAi
aacguuggaccaagagaacuu

SEQ ID NO: 38415 - RNA, 21 nt, RNAi
uuuugcaaccugguucucuug

SEQ ID NO: 38416 - DNA, 21 bp, homo sapiens
caagagaaccagcagcttcag

SEQ ID NO: 38417 - RNA, 21 nt, RNAi
agagaaccagcagcuucaguu

SEQ ID NO: 38418 - RNA, 21 nt, RNAi
uuucucuuggucgucgaaguc

SEQ ID NO: 38419 - DNA, 21 bp, homo sapiens
cagcagcttcaggaccagctc

SEQ ID NO: 38420 - RNA, 21 nt, RNAi
gcagcuucaggaccagcucuu

SEQ ID NO: 38421 - RNA, 21 nt, RNAi
uucgucgaaguccuggucgag

SEQ ID NO: 38422 - DNA, 21 bp, homo sapiens
cagcttcaggaccagctcaga

SEQ ID NO: 38423 - RNA, 21 nt, RNAi
gcuucaggaccagcucagauu

SEQ ID NO: 38424 - RNA, 21 nt, RNAi
uucgaaguccuggucgagucu

SEQ ID NO: 38425 - DNA, 21 bp, homo sapiens
caggaccagctcagagatgcc

SEQ ID NO: 38426 - RNA, 21 nt, RNAi
ggaccagcucagagaugccuu

SEQ ID NO: 38427 - RNA, 21 nt, RNAi
uuccuggucgagucucuacgg

SEQ ID NO: 38428 - DNA, 21 bp, homo sapiens
cagagcgcacaacactggagg

SEQ ID NO: 38429 - RNA, 21 nt, RNAi
gagcgcacaacacuggagguu

SEQ ID NO: 38430 - RNA, 21 nt, RNAi
uucucgcguguugugaccucc

SEQ ID NO: 38431 - DNA, 21 bp, homo sapiens
catttagccaaggtacaggcc

SEQ ID NO: 38432 - RNA, 21 nt, RNAi
uuuagccaagguacaggccuu

SEQ ID NO: 38433 - RNA, 21 nt, RNAi
uuaaaucgguuccauguccgg

SEQ ID NO: 38434 - DNA, 21 bp, homo sapiens
caacaggagctgaagaacttg

SEQ ID NO: 38435 - RNA, 21 nt, RNAi
acaggagcugaagaacuuguu

SEQ ID NO: 38436 - RNA, 21 nt, RNAi
uuuguccucgacuucuugaac

SEQ ID NO: 38437 - DNA, 21 bp, homo sapiens
caggagctgaagaacttgcgt

SEQ ID NO: 38438 - RNA, 21 nt, RNAi
ggagcugaagaacuugcguuu

SEQ ID NO: 38439 - RNA, 21 nt, RNAi
uuccucgacuucuugaacgca

SEQ ID NO: 38440 - DNA, 21 bp, homo sapiens
caggtggaattgcaggaagaa

SEQ ID NO: 38441 - RNA, 21 nt, RNAi
gguggaauugcaggaagaauu

SEQ ID NO: 38442 - RNA, 21 nt, RNAi
uuccaccuuaacguccuucuu

SEQ ID NO: 38443 - DNA, 21 bp, homo sapiens
caactagaggagaaggagagg

SEQ ID NO: 38444 - RNA, 21 nt, RNAi
acuagaggagaaggagagguu

SEQ ID NO: 38445 - RNA, 21 nt, RNAi
uuugaucuccucuuccucucc

SEQ ID NO: 38446 - DNA, 21 bp, homo sapiens
caagcagccaagcagaggtgg

SEQ ID NO: 38447 - RNA, 21 nt, RNAi
agcagccaagcagaggugguu

SEQ ID NO: 38448 - RNA, 21 nt, RNAi
uuucgucgguucgucuccacc

SEQ ID NO: 38449 - DNA, 21 bp, homo sapiens
cagccaagcagaggtggcatc

SEQ ID NO: 38450 - RNA, 21 nt, RNAi
gccaagcagagguggcaucuu

SEQ ID NO: 38451 - RNA, 21 nt, RNAi
uucgguucgucuccaccguag

SEQ ID NO: 38452 - DNA, 21 bp, homo sapiens
caagcagaggtggcatctctg

SEQ ID NO: 38453 - RNA, 21 nt, RNAi
agcagagguggcaucucuguu

SEQ ID NO: 38454 - RNA, 21 nt, RNAi
uuucgucuccaccguagagac

SEQ ID NO: 38455 - DNA, 21 bp, homo sapiens
catctctgcggcaggagactg

SEQ ID NO: 38456 - RNA, 21 nt, RNAi
ucucugcggcaggagacuguu

SEQ ID NO: 38457 - RNA, 21 nt, RNAi
uuagagacgccguccucugac

SEQ ID NO: 38458 - DNA, 21 bp, homo sapiens
caggcagccttactgactgag

SEQ ID NO: 38459 - RNA, 21 nt, RNAi
ggcagccuuacugacugaguu

SEQ ID NO: 38460 - RNA, 21 nt, RNAi
uuccgucggaaugacugacuc

SEQ ID NO: 38461 - DNA, 21 bp, homo sapiens
cacaaccagctgcaggaactc

SEQ ID NO: 38462 - RNA, 21 nt, RNAi
caaccagcugcaggaacucuu

SEQ ID NO: 38463 - RNA, 21 nt, RNAi
uuguuggucgacguccuugag

SEQ ID NO: 38464 - DNA, 21 bp, homo sapiens
caaccagctgcaggaactcaa

SEQ ID NO: 38465 - RNA, 21 nt, RNAi
accagcugcaggaacucaauu

SEQ ID NO: 38466 - RNA, 21 nt, RNAi
uuuggucgacguccuugaguu

SEQ ID NO: 38467 - DNA, 21 bp, homo sapiens
caacatccgtgtattctgccg

SEQ ID NO: 38468 - RNA, 21 nt, RNAi
acauccguguauucugccguu

SEQ ID NO: 38469 - RNA, 21 nt, RNAi
uuuguaggcacauaagacggc

SEQ ID NO: 38470 - DNA, 21 bp, homo sapiens
caccaggaagtggacaggatg

SEQ ID NO: 38471 - RNA, 21 nt, RNAi
ccaggaaguggacaggauguu

SEQ ID NO: 38472 - RNA, 21 nt, RNAi
uugguccuucaccuguccuac

SEQ ID NO: 38473 - DNA, 21 bp, homo sapiens
caggaagtggacaggatgaag

SEQ ID NO: 38474 - RNA, 21 nt, RNAi
ggaaguggacaggaugaaguu

SEQ ID NO: 38475 - RNA, 21 nt, RNAi
uuccuucaccuguccuacuuc

SEQ ID NO: 38476 - DNA, 21 bp, homo sapiens
caggatgaagtgtttgaagag

SEQ ID NO: 38477 - RNA, 21 nt, RNAi
ggaugaaguguuugaagaguu

SEQ ID NO: 38478 - RNA, 21 nt, RNAi
uuccuacuucacaaacuucuc

SEQ ID NO: 38479 - DNA, 21 bp, homo sapiens
cagtatgcatctttgcctatg

SEQ ID NO: 38480 - RNA, 21 nt, RNAi
guaugcaucuuugccuauguu

SEQ ID NO: 38481 - RNA, 21 nt, RNAi
uucauacguagaaacggauac

SEQ ID NO: 38482 - DNA, 21 bp, homo sapiens
catctttgcctatggccagac

SEQ ID NO: 38483 - RNA, 21 nt, RNAi
ucuuugccuauggccagacuu

SEQ ID NO: 38484 - RNA, 21 nt, RNAi
uuagaaacggauaccggucug

SEQ ID NO: 38485 - DNA, 21 bp, homo sapiens
cagacaggcagtggcaagacc

SEQ ID NO: 38486 - RNA, 21 nt, RNAi
gacaggcaguggcaagaccuu

SEQ ID NO: 38487 - RNA, 21 nt, RNAi
uucuguccgucaccguucugg

SEQ ID NO: 38488 - DNA, 21 bp, homo sapiens
caggcagtggcaagaccttca

SEQ ID NO: 38489 - RNA, 21 nt, RNAi
ggcaguggcaagaccuucauu

SEQ ID NO: 38490 - RNA, 21 nt, RNAi
uuccgucaccguucuggaagu

SEQ ID NO: 38491 - DNA, 21 bp, homo sapiens
cagtggcaagaccttcacaat

SEQ ID NO: 38492 - RNA, 21 nt, RNAi
guggcaagaccuucacaauuu

SEQ ID NO: 38493 - RNA, 21 nt, RNAi
uucaccguucuggaaguguua

SEQ ID NO: 38494 - DNA, 21 bp, homo sapiens
cacctcttctctgtggctcag

SEQ ID NO: 38495 - RNA, 21 nt, RNAi
ccucuucucuguggcucaguu

SEQ ID NO: 38496 - RNA, 21 nt, RNAi
uuggagaagagacaccgaguc

SEQ ID NO: 38497 - DNA, 21 bp, homo sapiens
cagctttgtagcaagctacgt

SEQ ID NO: 38498 - RNA, 21 nt, RNAi
gcuuuguagcaagcuacguuu

SEQ ID NO: 38499 - RNA, 21 nt, RNAi
uucgaaacaucguucgaugca

SEQ ID NO: 38500 - DNA, 21 bp, homo sapiens
caagctacgtagagatctaca

SEQ ID NO: 38501 - RNA, 21 nt, RNAi
agcuacguagagaucuacauu

SEQ ID NO: 38502 - RNA, 21 nt, RNAi
uuucgaugcaucucuagaugu

SEQ ID NO: 38503 - DNA, 21 bp, homo sapiens
cactgtcaccaatgctcgata

SEQ ID NO: 38504 - RNA, 21 nt, RNAi
cugucaccaaugcucgauauu

SEQ ID NO: 38505 - RNA, 21 nt, RNAi
uugacagugguuacgagcuau

SEQ ID NO: 38506 - DNA, 21 bp, homo sapiens
cagaatgaacggtcatcacgc

SEQ ID NO: 38507 - RNA, 21 nt, RNAi
gaaugaacggucaucacgcuu

SEQ ID NO: 38508 - RNA, 21 nt, RNAi
uucuuacuugccaguagugcg

SEQ ID NO: 38509 - DNA, 21 bp, homo sapiens
catcacgcagccacagtgtat

SEQ ID NO: 38510 - RNA, 21 nt, RNAi
ucacgcagccacaguguauuu

SEQ ID NO: 38511 - RNA, 21 nt, RNAi
uuagugcgucggugucacaua

SEQ ID NO: 38512 - DNA, 21 bp, homo sapiens
cacgcagccacagtgtattcc

SEQ ID NO: 38513 - RNA, 21 nt, RNAi
cgcagccacaguguauuccuu

SEQ ID NO: 38514 - RNA, 21 nt, RNAi
uugcgucggugucacauaagg

SEQ ID NO: 38515 - DNA, 21 bp, homo sapiens
cagccacagtgtattccagct

SEQ ID NO: 38516 - RNA, 21 nt, RNAi
gccacaguguauuccagcuuu

SEQ ID NO: 38517 - RNA, 21 nt, RNAi
uucggugucacauaaggucga

SEQ ID NO: 38518 - DNA, 21 bp, homo sapiens
cacagtgtattccagctacag

SEQ ID NO: 38519 - RNA, 21 nt, RNAi
caguguauuccagcuacaguu

SEQ ID NO: 38520 - RNA, 21 nt, RNAi
uugucacauaaggucgauguc

SEQ ID NO: 38521 - DNA, 21 bp, homo sapiens
cagtgtattccagctacagat

SEQ ID NO: 38522 - RNA, 21 nt, RNAi
guguauuccagcuacagauuu

SEQ ID NO: 38523 - RNA, 21 nt, RNAi
uucacauaaggucgaugucua

SEQ ID NO: 38524 - DNA, 21 bp, homo sapiens
cacaggccattaacagcagcc

SEQ ID NO: 38525 - RNA, 21 nt, RNAi
caggccauuaacagcagccuu

SEQ ID NO: 38526 - RNA, 21 nt, RNAi
uuguccgguaauugucgucgg

SEQ ID NO: 38527 - DNA, 21 bp, homo sapiens
caggccattaacagcagcctg

SEQ ID NO: 38528 - RNA, 21 nt, RNAi
ggccauuaacagcagccuguu

SEQ ID NO: 38529 - RNA, 21 nt, RNAi
uuccgguaauugucgucggac

SEQ ID NO: 38530 - DNA, 21 bp, homo sapiens
cattaacagcagcctgtccac

SEQ ID NO: 38531 - RNA, 21 nt, RNAi
uuaacagcagccuguccacuu

SEQ ID NO: 38532 - RNA, 21 nt, RNAi
uuaauugucgucggacaggug

SEQ ID NO: 38533 - DNA, 21 bp, homo sapiens
cacgtgccttaccggaacagc

SEQ ID NO: 38534 - RNA, 21 nt, RNAi
cgugccuuaccggaacagcuu

SEQ ID NO: 38535 - RNA, 21 nt, RNAi
uugcacggaauggccuugucg

SEQ ID NO: 38536 - DNA, 21 bp, homo sapiens
cagcaaactgacctacctgct

SEQ ID NO: 38537 - RNA, 21 nt, RNAi
gcaaacugaccuaccugcuuu

SEQ ID NO: 38538 - RNA, 21 nt, RNAi
uucguuugacuggauggacga

SEQ ID NO: 38539 - DNA, 21 bp, homo sapiens
caaactgacctacctgctgca

SEQ ID NO: 38540 - RNA, 21 nt, RNAi
aacugaccuaccugcugcauu

SEQ ID NO: 38541 - RNA, 21 nt, RNAi
uuuugacuggauggacgacgu

SEQ ID NO: 38542 - DNA, 21 bp, homo sapiens
catgtttgtgaacatttctcc

SEQ ID NO: 38543 - RNA, 21 nt, RNAi
uguuugugaacauuucuccuu

SEQ ID NO: 38544 - RNA, 21 nt, RNAi
uuacaaacacuuguaaagagg

SEQ ID NO: 38545 - DNA, 21 bp, homo sapiens
catttctccactggaagagaa

SEQ ID NO: 38546 - RNA, 21 nt, RNAi
uuucuccacuggaagagaauu

SEQ ID NO: 38547 - RNA, 21 nt, RNAi
uuaaagaggugaccuucucuu

SEQ ID NO: 38548 - DNA, 21 bp, homo sapiens
cactggaagagaacgtctccg

SEQ ID NO: 38549 - RNA, 21 nt, RNAi
cuggaagagaacgucuccguu

SEQ ID NO: 38550 - RNA, 21 nt, RNAi
uugaccuucucuugcagaggc

SEQ ID NO: 38551 - DNA, 21 bp, homo sapiens
caactctctacgctttgcctc

SEQ ID NO: 38552 - RNA, 21 nt, RNAi
acucucuacgcuuugccucuu

SEQ ID NO: 38553 - RNA, 21 nt, RNAi
uuugagagaugcgaaacggag

SEQ ID NO: 38554 - DNA, 21 bp, homo sapiens
caaggtgaaccagtgtgttat

SEQ ID NO: 38555 - RNA, 21 nt, RNAi
aggugaaccaguguguuauuu

SEQ ID NO: 38556 - RNA, 21 nt, RNAi
uuuccacuuggucacacaaua

SEQ ID NO: 38557 - DNA, 21 bp, homo sapiens
cagtgtgttattggtactgct

SEQ ID NO: 38558 - RNA, 21 nt, RNAi
guguguuauugguacugcuuu

SEQ ID NO: 38559 - RNA, 21 nt, RNAi
uucacacaauaaccaugacga

SEQ ID NO: 38560 - DNA, 21 bp, homo sapiens
caggccaacaggaagtgaaga

SEQ ID NO: 38561 - RNA, 21 nt, RNAi
ggccaacaggaagugaagauu

SEQ ID NO: 38562 - RNA, 21 nt, RNAi
uuccgguuguccuucacuucu

SEQ ID NO: 38563 - DNA, 21 bp, homo sapiens
caacaggaagtgaagacggat

SEQ ID NO: 38564 - RNA, 21 nt, RNAi
acaggaagugaagacggauuu

SEQ ID NO: 38565 - RNA, 21 nt, RNAi
uuuguccuucacuucugccua

SEQ ID NO: 38566 - DNA, 21 bp, homo sapiens
caggaagtgaagacggatcca

SEQ ID NO: 38567 - RNA, 21 nt, RNAi
ggaagugaagacggauccauu

SEQ ID NO: 38568 - RNA, 21 nt, RNAi
uuccuucacuucugccuaggu

SEQ ID NO: 38569 - DNA, 21 bp, homo sapiens
cagatctgtgtgtgtgtgtgt

SEQ ID NO: 38570 - RNA, 21 nt, RNAi
gaucuguguguguguguguuu

SEQ ID NO: 38571 - RNA, 21 nt, RNAi
uucuagacacacacacacaca

SEQ ID NO: 38572 - DNA, 21 bp, homo sapiens
gagccgtgcgagttctctacc

SEQ ID NO: 38573 - RNA, 21 nt, RNAi
gccgugcgaguucucuaccuu

SEQ ID NO: 38574 - RNA, 21 nt, RNAi
uucggcacgcucaagagaugg

SEQ ID NO: 38575 - DNA, 21 bp, homo sapiens
gaccgaggtggacatggatcc

SEQ ID NO: 38576 - RNA, 21 nt, RNAi
ccgagguggacauggauccuu

SEQ ID NO: 38577 - RNA, 21 nt, RNAi
uuggcuccaccuguaccuagg

SEQ ID NO: 38578 - DNA, 21 bp, homo sapiens
gaggtggacatggatccgcag

SEQ ID NO: 38579 - RNA, 21 nt, RNAi
gguggacauggauccgcaguu

SEQ ID NO: 38580 - RNA, 21 nt, RNAi
uuccaccuguaccuaggcguc

SEQ ID NO: 38581 - DNA, 21 bp, homo sapiens
gacatggatccgcagaggtcc

SEQ ID NO: 38582 - RNA, 21 nt, RNAi
cauggauccgcagagguccuu

SEQ ID NO: 38583 - RNA, 21 nt, RNAi
uuguaccuaggcgucuccagg

SEQ ID NO: 38584 - DNA, 21 bp, homo sapiens
gaacatagaactgaagagacc

SEQ ID NO: 38585 - RNA, 21 nt, RNAi
acauagaacugaagagaccuu

SEQ ID NO: 38586 - RNA, 21 nt, RNAi
uuuguaucuugacuucucugg

SEQ ID NO: 38587 - DNA, 21 bp, homo sapiens
gaactgaagagacctctgatt

SEQ ID NO: 38588 - RNA, 21 nt, RNAi
acugaagagaccucugauuuu

SEQ ID NO: 38589 - RNA, 21 nt, RNAi
uuugacuucucuggagacuaa

SEQ ID NO: 38590 - DNA, 21 bp, homo sapiens
gaagagacctctgattaaggc

SEQ ID NO: 38591 - RNA, 21 nt, RNAi
agagaccucugauuaaggcuu

SEQ ID NO: 38592 - RNA, 21 nt, RNAi
uuucucuggagacuaauuccg

SEQ ID NO: 38593 - DNA, 21 bp, homo sapiens
gaagcagactcaagaggaggc

SEQ ID NO: 38594 - RNA, 21 nt, RNAi
agcagacucaagaggaggcuu

SEQ ID NO: 38595 - RNA, 21 nt, RNAi
uuucgucugaguucuccuccg

SEQ ID NO: 38596 - DNA, 21 bp, homo sapiens
gactcaagaggaggcctgacc

SEQ ID NO: 38597 - RNA, 21 nt, RNAi
cucaagaggaggccugaccuu

SEQ ID NO: 38598 - RNA, 21 nt, RNAi
uugaguucuccuccggacugg

SEQ ID NO: 38599 - DNA, 21 bp, homo sapiens
gaggaggcctgaccagatgga

SEQ ID NO: 38600 - RNA, 21 nt, RNAi
ggaggccugaccagauggauu

SEQ ID NO: 38601 - RNA, 21 nt, RNAi
uuccuccggacuggucuaccu

SEQ ID NO: 38602 - DNA, 21 bp, homo sapiens
gaggcctgaccagatggaaga

SEQ ID NO: 38603 - RNA, 21 nt, RNAi
ggccugaccagauggaagauu

SEQ ID NO: 38604 - RNA, 21 nt, RNAi
uuccggacuggucuaccuucu

SEQ ID NO: 38605 - DNA, 21 bp, homo sapiens
gaccagatggaagatggcctg

SEQ ID NO: 38606 - RNA, 21 nt, RNAi
ccagauggaagauggccuguu

SEQ ID NO: 38607 - RNA, 21 nt, RNAi
uuggucuaccuucuaccggac

SEQ ID NO: 38608 - DNA, 21 bp, homo sapiens
gatggaagatggcctggagcc

SEQ ID NO: 38609 - RNA, 21 nt, RNAi
uggaagauggccuggagccuu

SEQ ID NO: 38610 - RNA, 21 nt, RNAi
uuaccuucuaccggaccucgg

SEQ ID NO: 38611 - DNA, 21 bp, homo sapiens
gaagatggcctggagcctgag

SEQ ID NO: 38612 - RNA, 21 nt, RNAi
agauggccuggagccugaguu

SEQ ID NO: 38613 - RNA, 21 nt, RNAi
uuucuaccggaccucggacuc

SEQ ID NO: 38614 - DNA, 21 bp, homo sapiens
gatggcctggagcctgagaag

SEQ ID NO: 38615 - RNA, 21 nt, RNAi
uggccuggagccugagaaguu

SEQ ID NO: 38616 - RNA, 21 nt, RNAi
uuaccggaccucggacucuuc

SEQ ID NO: 38617 - DNA, 21 bp, homo sapiens
gagcctgagaagaaacggaca

SEQ ID NO: 38618 - RNA, 21 nt, RNAi
gccugagaagaaacggacauu

SEQ ID NO: 38619 - RNA, 21 nt, RNAi
uucggacucuucuuugccugu

SEQ ID NO: 38620 - DNA, 21 bp, homo sapiens
gagaagaaacggacaagaggc

SEQ ID NO: 38621 - RNA, 21 nt, RNAi
gaagaaacggacaagaggcuu

SEQ ID NO: 38622 - RNA, 21 nt, RNAi
uucuucuuugccuguucuccg

SEQ ID NO: 38623 - DNA, 21 bp, homo sapiens
gaagaaacggacaagaggcct

SEQ ID NO: 38624 - RNA, 21 nt, RNAi
agaaacggacaagaggccuuu

SEQ ID NO: 38625 - RNA, 21 nt, RNAi
uuucuuugccuguucuccgga

SEQ ID NO: 38626 - DNA, 21 bp, homo sapiens
gacacaaggccagaccacagc

SEQ ID NO: 38627 - RNA, 21 nt, RNAi
cacaaggccagaccacagcuu

SEQ ID NO: 38628 - RNA, 21 nt, RNAi
uuguguuccggucuggugucg

SEQ ID NO: 38629 - DNA, 21 bp, homo sapiens
gaagaaccagaagccagttcc

SEQ ID NO: 38630 - RNA, 21 nt, RNAi
agaaccagaagccaguuccuu

SEQ ID NO: 38631 - RNA, 21 nt, RNAi
uuucuuggucuucggucaagg

SEQ ID NO: 38632 - DNA, 21 bp, homo sapiens
gaaccagaagccagttcctgc

SEQ ID NO: 38633 - RNA, 21 nt, RNAi
accagaagccaguuccugcuu

SEQ ID NO: 38634 - RNA, 21 nt, RNAi
uuuggucuucggucaaggacg

SEQ ID NO: 38635 - DNA, 21 bp, homo sapiens
gaagccagttcctgctgttcc

SEQ ID NO: 38636 - RNA, 21 nt, RNAi
agccaguuccugcuguuccuu

SEQ ID NO: 38637 - RNA, 21 nt, RNAi
uuucggucaaggacgacaagg

SEQ ID NO: 38638 - DNA, 21 bp, homo sapiens
gaagtctggcacatcaggtgt

SEQ ID NO: 38639 - RNA, 21 nt, RNAi
agucuggcacaucagguguuu

SEQ ID NO: 38640 - RNA, 21 nt, RNAi
uuucagaccguguaguccaca

SEQ ID NO: 38641 - DNA, 21 bp, homo sapiens
gagaggactcaaacgttggac

SEQ ID NO: 38642 - RNA, 21 nt, RNAi
gaggacucaaacguuggacuu

SEQ ID NO: 38643 - RNA, 21 nt, RNAi
uucuccugaguuugcaaccug

SEQ ID NO: 38644 - DNA, 21 bp, homo sapiens
gaggactcaaacgttggacca

SEQ ID NO: 38645 - RNA, 21 nt, RNAi
ggacucaaacguuggaccauu

SEQ ID NO: 38646 - RNA, 21 nt, RNAi
uuccugaguuugcaaccuggu

SEQ ID NO: 38647 - DNA, 21 bp, homo sapiens
gactcaaacgttggaccaaga

SEQ ID NO: 38648 - RNA, 21 nt, RNAi
cucaaacguuggaccaagauu

SEQ ID NO: 38649 - RNA, 21 nt, RNAi
uugaguuugcaaccugguucu

SEQ ID NO: 38650 - DNA, 21 bp, homo sapiens
gaccaagagaaccagcagctt

SEQ ID NO: 38651 - RNA, 21 nt, RNAi
ccaagagaaccagcagcuuuu

SEQ ID NO: 38652 - RNA, 21 nt, RNAi
uugguucucuuggucgucgaa

SEQ ID NO: 38653 - DNA, 21 bp, homo sapiens
gagaaccagcagcttcaggac

SEQ ID NO: 38654 - RNA, 21 nt, RNAi
gaaccagcagcuucaggacuu

SEQ ID NO: 38655 - RNA, 21 nt, RNAi
uucuuggucgucgaaguccug

SEQ ID NO: 38656 - DNA, 21 bp, homo sapiens
gaaccagcagcttcaggacca

SEQ ID NO: 38657 - RNA, 21 nt, RNAi
accagcagcuucaggaccauu

SEQ ID NO: 38658 - RNA, 21 nt, RNAi
uuuggucgucgaaguccuggu

SEQ ID NO: 38659 - DNA, 21 bp, homo sapiens
gacagagcgcacaacactgga

SEQ ID NO: 38660 - RNA, 21 nt, RNAi
cagagcgcacaacacuggauu

SEQ ID NO: 38661 - RNA, 21 nt, RNAi
uugucucgcguguugugaccu

SEQ ID NO: 38662 - DNA, 21 bp, homo sapiens
gagctgaagaacttgcgtgct

SEQ ID NO: 38663 - RNA, 21 nt, RNAi
gcugaagaacuugcgugcuuu

SEQ ID NO: 38664 - RNA, 21 nt, RNAi
uucgacuucuugaacgcacga

SEQ ID NO: 38665 - DNA, 21 bp, homo sapiens
gaagaacttgcgtgcttgtgt

SEQ ID NO: 38666 - RNA, 21 nt, RNAi
agaacuugcgugcuuguguuu

SEQ ID NO: 38667 - RNA, 21 nt, RNAi
uuucuugaacgcacgaacaca

SEQ ID NO: 38668 - DNA, 21 bp, homo sapiens
gaacttgcgtgcttgtgtcct

SEQ ID NO: 38669 - RNA, 21 nt, RNAi
acuugcgugcuuguguccuuu

SEQ ID NO: 38670 - RNA, 21 nt, RNAi
uuugaacgcacgaacacagga

SEQ ID NO: 38671 - DNA, 21 bp, homo sapiens
gaattgcaggaagaacggagg

SEQ ID NO: 38672 - RNA, 21 nt, RNAi
auugcaggaagaacggagguu

SEQ ID NO: 38673 - RNA, 21 nt, RNAi
uuuaacguccuucuugccucc

SEQ ID NO: 38674 - DNA, 21 bp, homo sapiens
gaggagaaggagaggaggctg

SEQ ID NO: 38675 - RNA, 21 nt, RNAi
ggagaaggagaggaggcuguu

SEQ ID NO: 38676 - RNA, 21 nt, RNAi
uuccucuuccucuccuccgac

SEQ ID NO: 38677 - DNA, 21 bp, homo sapiens
gagaaggagaggaggctgcag

SEQ ID NO: 38678 - RNA, 21 nt, RNAi
gaaggagaggaggcugcaguu

SEQ ID NO: 38679 - RNA, 21 nt, RNAi
uucuuccucuccuccgacguc

SEQ ID NO: 38680 - DNA, 21 bp, homo sapiens
gaaggagaggaggctgcagac

SEQ ID NO: 38681 - RNA, 21 nt, RNAi
aggagaggaggcugcagacuu

SEQ ID NO: 38682 - RNA, 21 nt, RNAi
uuuccucuccuccgacgucug

SEQ ID NO: 38683 - DNA, 21 bp, homo sapiens
gagaggaggctgcagacatca

SEQ ID NO: 38684 - RNA, 21 nt, RNAi
gaggaggcugcagacaucauu

SEQ ID NO: 38685 - RNA, 21 nt, RNAi
uucuccuccgacgucuguagu

SEQ ID NO: 38686 - DNA, 21 bp, homo sapiens
gaggaggctgcagacatcaga

SEQ ID NO: 38687 - RNA, 21 nt, RNAi
ggaggcugcagacaucagauu

SEQ ID NO: 38688 - RNA, 21 nt, RNAi
uuccuccgacgucuguagucu

SEQ ID NO: 38689 - DNA, 21 bp, homo sapiens
gaggctgcagacatcagaagc

SEQ ID NO: 38690 - RNA, 21 nt, RNAi
ggcugcagacaucagaagcuu

SEQ ID NO: 38691 - RNA, 21 nt, RNAi
uuccgacgucuguagucuucg

SEQ ID NO: 38692 - DNA, 21 bp, homo sapiens
gactgcacaaccagctgcagg

SEQ ID NO: 38693 - RNA, 21 nt, RNAi
cugcacaaccagcugcagguu

SEQ ID NO: 38694 - RNA, 21 nt, RNAi
uugacguguuggucgacgucc

SEQ ID NO: 38695 - DNA, 21 bp, homo sapiens
gaagtggacaggatgaagtgt

SEQ ID NO: 38696 - RNA, 21 nt, RNAi
aguggacaggaugaaguguuu

SEQ ID NO: 38697 - RNA, 21 nt, RNAi
uuucaccuguccuacuucaca

SEQ ID NO: 38698 - DNA, 21 bp, homo sapiens
gacaggatgaagtgtttgaag

SEQ ID NO: 38699 - RNA, 21 nt, RNAi
caggaugaaguguuugaaguu

SEQ ID NO: 38700 - RNA, 21 nt, RNAi
uuguccuacuucacaaacuuc

SEQ ID NO: 38701 - DNA, 21 bp, homo sapiens
gatgaagtgtttgaagagatt

SEQ ID NO: 38702 - RNA, 21 nt, RNAi
ugaaguguuugaagagauuuu

SEQ ID NO: 38703 - RNA, 21 nt, RNAi
uuacuucacaaacuucucuaa

SEQ ID NO: 38704 - DNA, 21 bp, homo sapiens
gaagtgtttgaagagattgcc

SEQ ID NO: 38705 - RNA, 21 nt, RNAi
aguguuugaagagauugccuu

SEQ ID NO: 38706 - RNA, 21 nt, RNAi
uuucacaaacuucucuaacgg

SEQ ID NO: 38707 - DNA, 21 bp, homo sapiens
gaagagattgccatgcttgtc

SEQ ID NO: 38708 - RNA, 21 nt, RNAi
agagauugccaugcuugucuu

SEQ ID NO: 38709 - RNA, 21 nt, RNAi
uuucucuaacgguacgaacag

SEQ ID NO: 38710 - DNA, 21 bp, homo sapiens
gagattgccatgcttgtccag

SEQ ID NO: 38711 - RNA, 21 nt, RNAi
gauugccaugcuuguccaguu

SEQ ID NO: 38712 - RNA, 21 nt, RNAi
uucuaacgguacgaacagguc

SEQ ID NO: 38713 - DNA, 21 bp, homo sapiens
gattgccatgcttgtccagtc

SEQ ID NO: 38714 - RNA, 21 nt, RNAi
uugccaugcuuguccagucuu

SEQ ID NO: 38715 - RNA, 21 nt, RNAi
uuaacgguacgaacaggucag

SEQ ID NO: 38716 - DNA, 21 bp, homo sapiens
gatggctatccagtatgcatc

SEQ ID NO: 38717 - RNA, 21 nt, RNAi
uggcuauccaguaugcaucuu

SEQ ID NO: 38718 - RNA, 21 nt, RNAi
uuaccgauaggucauacguag

SEQ ID NO: 38719 - DNA, 21 bp, homo sapiens
gacaggcagtggcaagacctt

SEQ ID NO: 38720 - RNA, 21 nt, RNAi
caggcaguggcaagaccuuuu

SEQ ID NO: 38721 - RNA, 21 nt, RNAi
uuguccgucaccguucuggaa

SEQ ID NO: 38722 - DNA, 21 bp, homo sapiens
gacctacagctttgtagcaag

SEQ ID NO: 38723 - RNA, 21 nt, RNAi
ccuacagcuuuguagcaaguu

SEQ ID NO: 38724 - RNA, 21 nt, RNAi
uuggaugucgaaacaucguuc

SEQ ID NO: 38725 - DNA, 21 bp, homo sapiens
gagatctacaatgagactgtc

SEQ ID NO: 38726 - RNA, 21 nt, RNAi
gaucuacaaugagacugucuu

SEQ ID NO: 38727 - RNA, 21 nt, RNAi
uucuagauguuacucugacag

SEQ ID NO: 38728 - DNA, 21 bp, homo sapiens
gatctacaatgagactgtccg

SEQ ID NO: 38729 - RNA, 21 nt, RNAi
ucuacaaugagacuguccguu

SEQ ID NO: 38730 - RNA, 21 nt, RNAi
uuagauguuacucugacaggc

SEQ ID NO: 38731 - DNA, 21 bp, homo sapiens
gagtgtgagattcgccgtgca

SEQ ID NO: 38732 - RNA, 21 nt, RNAi
gugugagauucgccgugcauu

SEQ ID NO: 38733 - RNA, 21 nt, RNAi
uucacacucuaagcggcacgu

SEQ ID NO: 38734 - DNA, 21 bp, homo sapiens
gagtgaggagctcactgtcac

SEQ ID NO: 38735 - RNA, 21 nt, RNAi
gugaggagcucacugucacuu

SEQ ID NO: 38736 - RNA, 21 nt, RNAi
uucacuccucgagugacagug

SEQ ID NO: 38737 - DNA, 21 bp, homo sapiens
gaggagctcactgtcaccaat

SEQ ID NO: 38738 - RNA, 21 nt, RNAi
ggagcucacugucaccaauuu

SEQ ID NO: 38739 - RNA, 21 nt, RNAi
uuccucgagugacagugguua

SEQ ID NO: 38740 - DNA, 21 bp, homo sapiens
gagctcactgtcaccaatgct

SEQ ID NO: 38741 - RNA, 21 nt, RNAi
gcucacugucaccaaugcuuu

SEQ ID NO: 38742 - RNA, 21 nt, RNAi
uucgagugacagugguuacga

SEQ ID NO: 38743 - DNA, 21 bp, homo sapiens
gaatgaacggtcatcacgcag

SEQ ID NO: 38744 - RNA, 21 nt, RNAi
augaacggucaucacgcaguu

SEQ ID NO: 38745 - RNA, 21 nt, RNAi
uuuacuugccaguagugcguc

SEQ ID NO: 38746 - DNA, 21 bp, homo sapiens
gaacggtcatcacgcagccac

SEQ ID NO: 38747 - RNA, 21 nt, RNAi
acggucaucacgcagccacuu

SEQ ID NO: 38748 - RNA, 21 nt, RNAi
uuugccaguagugcgucggug

SEQ ID NO: 38749 - DNA, 21 bp, homo sapiens
gaaacacaggccattaacagc

SEQ ID NO: 38750 - RNA, 21 nt, RNAi
aacacaggccauuaacagcuu

SEQ ID NO: 38751 - RNA, 21 nt, RNAi
uuuuguguccgguaauugucg

SEQ ID NO: 38752 - DNA, 21 bp, homo sapiens
gaacagcaaactgacctacct

SEQ ID NO: 38753 - RNA, 21 nt, RNAi
acagcaaacugaccuaccuuu

SEQ ID NO: 38754 - RNA, 21 nt, RNAi
uuugucguuugacuggaugga

SEQ ID NO: 38755 - DNA, 21 bp, homo sapiens
gacctacctgctgcagaactc

SEQ ID NO: 38756 - RNA, 21 nt, RNAi
ccuaccugcugcagaacucuu

SEQ ID NO: 38757 - RNA, 21 nt, RNAi
uuggauggacgacgucuugag

SEQ ID NO: 38758 - DNA, 21 bp, homo sapiens
gatgctcatgtttgtgaacat

SEQ ID NO: 38759 - RNA, 21 nt, RNAi
ugcucauguuugugaacauuu

SEQ ID NO: 38760 - RNA, 21 nt, RNAi
uuacgaguacaaacacuugua

SEQ ID NO: 38761 - DNA, 21 bp, homo sapiens
gaacatttctccactggaaga

SEQ ID NO: 38762 - RNA, 21 nt, RNAi
acauuucuccacuggaagauu

SEQ ID NO: 38763 - RNA, 21 nt, RNAi
uuuguaaagaggugaccuucu

SEQ ID NO: 38764 - DNA, 21 bp, homo sapiens
gaagagaacgtctccgagtcc

SEQ ID NO: 38765 - RNA, 21 nt, RNAi
agagaacgucuccgaguccuu

SEQ ID NO: 38766 - RNA, 21 nt, RNAi
uuucucuugcagaggcucagg

SEQ ID NO: 38767 - DNA, 21 bp, homo sapiens
gaaccagtgtgttattggtac

SEQ ID NO: 38768 - RNA, 21 nt, RNAi
accaguguguuauugguacuu

SEQ ID NO: 38769 - RNA, 21 nt, RNAi
uuuggucacacaauaaccaug

SEQ ID NO: 38770 - DNA, 21 bp, homo sapiens
gaagtgaagacggatccagat

SEQ ID NO: 38771 - RNA, 21 nt, RNAi
agugaagacggauccagauuu

SEQ ID NO: 38772 - RNA, 21 nt, RNAi
uuucacuucugccuaggucua

SEQ ID NO: 38773 - DNA, 21 bp, homo sapiens
gaagacggatccagatctgtg

SEQ ID NO: 38774 - RNA, 21 nt, RNAi
agacggauccagaucuguguu

SEQ ID NO: 38775 - RNA, 21 nt, RNAi
uuucugccuaggucuagacac

SEQ ID NO: 38776 - DNA, 21 bp, homo sapiens
gacggatccagatctgtgtgt

SEQ ID NO: 38777 - RNA, 21 nt, RNAi
cggauccagaucuguguguuu

SEQ ID NO: 38778 - RNA, 21 nt, RNAi
uugccuaggucuagacacaca

SEQ ID NO: 38779 - DNA, 21 bp, homo sapiens
gatccagatctgtgtgtgtgt

SEQ ID NO: 38780 - RNA, 21 nt, RNAi
uccagaucuguguguguguuu

SEQ ID NO: 38781 - RNA, 21 nt, RNAi
uuaggucuagacacacacaca

SEQ ID NO: 38782 - DNA, 21 bp, homo sapiens
gatctgtgtgtgtgtgtgtgt

SEQ ID NO: 38783 - RNA, 21 nt, RNAi
ucuguguguguguguguguuu

SEQ ID NO: 38784 - RNA, 21 nt, RNAi
uuagacacacacacacacaca

SEQ ID NO: 38785 - DNA, 21 bp, homo sapiens
tagaactgaagagacctctga

SEQ ID NO: 38786 - RNA, 21 nt, RNAi
gaacugaagagaccucugauu

SEQ ID NO: 38787 - RNA, 21 nt, RNAi
uucuugacuucucuggagacu

SEQ ID NO: 38788 - DNA, 21 bp, homo sapiens
tacagtgccacagacacaagg

SEQ ID NO: 38789 - RNA, 21 nt, RNAi
cagugccacagacacaagguu

SEQ ID NO: 38790 - RNA, 21 nt, RNAi
uugucacggugucuguguucc

SEQ ID NO: 38791 - DNA, 21 bp, homo sapiens
tatgtgacctaaatgcagaac

SEQ ID NO: 38792 - RNA, 21 nt, RNAi
ugugaccuaaaugcagaacuu

SEQ ID NO: 38793 - RNA, 21 nt, RNAi
uuacacuggauuuacgucuug

SEQ ID NO: 38794 - DNA, 21 bp, homo sapiens
tagaggagaaggagaggaggc

SEQ ID NO: 38795 - RNA, 21 nt, RNAi
gaggagaaggagaggaggcuu

SEQ ID NO: 38796 - RNA, 21 nt, RNAi
uucuccucuuccucuccuccg

SEQ ID NO: 38797 - DNA, 21 bp, homo sapiens
tatccagtatgcatctttgcc

SEQ ID NO: 38798 - RNA, 21 nt, RNAi
uccaguaugcaucuuugccuu

SEQ ID NO: 38799 - RNA, 21 nt, RNAi
uuaggucauacguagaaacgg

SEQ ID NO: 38800 - DNA, 21 bp, homo sapiens
tatgcatctttgcctatggcc

SEQ ID NO: 38801 - RNA, 21 nt, RNAi
ugcaucuuugccuauggccuu

SEQ ID NO: 38802 - RNA, 21 nt, RNAi
uuacguagaaacggauaccgg

SEQ ID NO: 38803 - DNA, 21 bp, homo sapiens
tatggccagacaggcagtggc

SEQ ID NO: 38804 - RNA, 21 nt, RNAi
uggccagacaggcaguggcuu

SEQ ID NO: 38805 - RNA, 21 nt, RNAi
uuaccggucuguccgucaccg

SEQ ID NO: 38806 - DNA, 21 bp, homo sapiens
tacagctttgtagcaagctac

SEQ ID NO: 38807 - RNA, 21 nt, RNAi
cagcuuuguagcaagcuacuu

SEQ ID NO: 38808 - RNA, 21 nt, RNAi
uugucgaaacaucguucgaug

SEQ ID NO: 38809 - DNA, 21 bp, homo sapiens
tagcaagctacgtagagatct

SEQ ID NO: 38810 - RNA, 21 nt, RNAi
gcaagcuacguagagaucuuu

SEQ ID NO: 38811 - RNA, 21 nt, RNAi
uucguucgaugcaucucuaga

SEQ ID NO: 38812 - DNA, 21 bp, homo sapiens
tacgtagagatctacaatgag

SEQ ID NO: 38813 - RNA, 21 nt, RNAi
cguagagaucuacaaugaguu

SEQ ID NO: 38814 - RNA, 21 nt, RNAi
uugcaucucuagauguuacuc

SEQ ID NO: 38815 - DNA, 21 bp, homo sapiens
tagagatctacaatgagactg

SEQ ID NO: 38816 - RNA, 21 nt, RNAi
gagaucuacaaugagacuguu

SEQ ID NO: 38817 - RNA, 21 nt, RNAi
uucucuagauguuacucugac

SEQ ID NO: 38818 - DNA, 21 bp, homo sapiens
tattccagctacagatttctg

SEQ ID NO: 38819 - RNA, 21 nt, RNAi
uuccagcuacagauuucuguu

SEQ ID NO: 38820 - RNA, 21 nt, RNAi
uuaaggucgaugucuaaagac

SEQ ID NO: 38821 - DNA, 21 bp, homo sapiens
taacagcagcctgtccacgct

SEQ ID NO: 38822 - RNA, 21 nt, RNAi
acagcagccuguccacgcuuu

SEQ ID NO: 38823 - RNA, 21 nt, RNAi
uuugucgucggacaggugcga

SEQ ID NO: 38824 - DNA, 21 bp, homo sapiens
taccggaacagcaaactgacc

SEQ ID NO: 38825 - RNA, 21 nt, RNAi
ccggaacagcaaacugaccuu

SEQ ID NO: 38826 - RNA, 21 nt, RNAi
uuggccuugucguuugacugg

SEQ ID NO: 38827 - DNA, 21 bp, homo sapiens
tacctgctgcagaactctctg

SEQ ID NO: 38828 - RNA, 21 nt, RNAi
ccugcugcagaacucucuguu

SEQ ID NO: 38829 - RNA, 21 nt, RNAi
uuggacgacgucuugagagac

SEQ ID NO: 38830 - DNA, 21 bp, homo sapiens
tagtgctaagatgctcatgtt

SEQ ID NO: 38831 - RNA, 21 nt, RNAi
gugcuaagaugcucauguuuu

SEQ ID NO: 38832 - RNA, 21 nt, RNAi
uucacgauucuacgaguacaa

SEQ ID NO: 38833 - DNA, 21 bp, homo sapiens
taagatgctcatgtttgtgaa

SEQ ID NO: 38834 - RNA, 21 nt, RNAi
agaugcucauguuugugaauu

SEQ ID NO: 38835 - RNA, 21 nt, RNAi
uuucuacgaguacaaacacuu

SEQ ID NO: 38836 - DNA, 21 bp, homo sapiens
tacgctttgcctccaaggtga

SEQ ID NO: 38837 - RNA, 21 nt, RNAi
cgcuuugccuccaaggugauu

SEQ ID NO: 38838 - RNA, 21 nt, RNAi
uugcgaaacggagguuccacu

SEQ ID NO: 38839 - DNA, 21 bp, homo sapiens
tattggtactgctcaggccaa

SEQ ID NO: 38840 - RNA, 21 nt, RNAi
uugguacugcucaggccaauu

SEQ ID NO: 38841 - RNA, 21 nt, RNAi
uuaaccaugacgaguccgguu

SEQ ID NO: 38842 - DNA, 21 bp, homo sapiens
tactgctcaggccaacaggaa

SEQ ID NO: 38843 - RNA, 21 nt, RNAi
cugcucaggccaacaggaauu

SEQ ID NO: 38844 - RNA, 21 nt, RNAi
uugacgaguccgguuguccuu

SEQ ID NO: 38845 - DNA, 21 bp, homo sapiens
aagtctggcacatcaggtgtt

SEQ ID NO: 38846 - RNA, 21 nt, RNAi
gucuggcacaucagguguuuu

SEQ ID NO: 38847 - RNA, 21 nt, RNAi
uucagaccguguaguccacaa

SEQ ID NO: 38848 - DNA, 21 bp, homo sapiens
cagttatgtgacctaaatgca

SEQ ID NO: 38849 - RNA, 21 nt, RNAi
guuaugugaccuaaaugcauu

SEQ ID NO: 38850 - RNA, 21 nt, RNAi
uucaauacacuggauuuacgu

SEQ ID NO: 38851 - DNA, 21 bp, homo sapiens
caacatccgtgtattctgccg

SEQ ID NO: 38852 - RNA, 21 nt, RNAi
acauccguguauucugccguu

SEQ ID NO: 38853 - RNA, 21 nt, RNAi
uuuguaggcacauaagacggc

SEQ ID NO: 38854 - DNA, 21 bp, homo sapiens
cagcaaactgacctacctgct

SEQ ID NO: 38855 - RNA, 21 nt, RNAi
gcaaacugaccuaccugcuuu

SEQ ID NO: 38856 - RNA, 21 nt, RNAi
uucguuugacuggauggacga

SEQ ID NO: 38857 - DNA, 21 bp, homo sapiens
caaactgacctacctgctgca

SEQ ID NO: 38858 - RNA, 21 nt, RNAi
aacugaccuaccugcugcauu

SEQ ID NO: 38859 - RNA, 21 nt, RNAi
uuuugacuggauggacgacgu

SEQ ID NO: 38860 - DNA, 21 bp, homo sapiens
gagcctgagaagaaacggaca

SEQ ID NO: 38861 - RNA, 21 nt, RNAi
gccugagaagaaacggacauu

SEQ ID NO: 38862 - RNA, 21 nt, RNAi
uucggacucuucuuugccugu

SEQ ID NO: 38863 - DNA, 21 bp, homo sapiens
gagaagaaacggacaagaggc

SEQ ID NO: 38864 - RNA, 21 nt, RNAi
gaagaaacggacaagaggcuu

SEQ ID NO: 38865 - RNA, 21 nt, RNAi
uucuucuuugccuguucuccg

SEQ ID NO: 38866 - DNA, 21 bp, homo sapiens
gaagaaacggacaagaggcct

SEQ ID NO: 38867 - RNA, 21 nt, RNAi
agaaacggacaagaggccuuu

SEQ ID NO: 38868 - RNA, 21 nt, RNAi
uuucuuugccuguucuccgga

SEQ ID NO: 38869 - DNA, 21 bp, homo sapiens
gaagtctggcacatcaggtgt

SEQ ID NO: 38870 - RNA, 21 nt, RNAi
agucuggcacaucagguguuu

SEQ ID NO: 38871 - RNA, 21 nt, RNAi
uuucagaccguguaguccaca

SEQ ID NO: 38872 - DNA, 21 bp, homo sapiens
gagaggactcaaacgttggac

SEQ ID NO: 38873 - RNA, 21 nt, RNAi
gaggacucaaacguuggacuu

SEQ ID NO: 38874 - RNA, 21 nt, RNAi
uucuccugaguuugcaaccug

SEQ ID NO: 38875 - DNA, 21 bp, homo sapiens
gaggactcaaacgttggacca

SEQ ID NO: 38876 - RNA, 21 nt, RNAi
ggacucaaacguuggaccauu

SEQ ID NO: 38877 - RNA, 21 nt, RNAi
uuccugaguuugcaaccuggu

SEQ ID NO: 38878 - DNA, 21 bp, homo sapiens
gactcaaacgttggaccaaga

SEQ ID NO: 38879 - RNA, 21 nt, RNAi
cucaaacguuggaccaagauu

SEQ ID NO: 38880 - RNA, 21 nt, RNAi
uugaguuugcaaccugguucu

SEQ ID NO: 38881 - DNA, 21 bp, homo sapiens
gagctgaagaacttgcgtgct

SEQ ID NO: 38882 - RNA, 21 nt, RNAi
gcugaagaacuugcgugcuuu

SEQ ID NO: 38883 - RNA, 21 nt, RNAi
uucgacuucuugaacgcacga

SEQ ID NO: 38884 - DNA, 21 bp, homo sapiens
aatgacgaggtggcgagtgag

SEQ ID NO: 38885 - RNA, 21 nt, RNAi
ugacgagguggcgagugaguu

SEQ ID NO: 38886 - RNA, 21 nt, RNAi
uuacugcuccaccgcucacuc

SEQ ID NO: 38887 - DNA, 21 bp, homo sapiens
aagccacagtaaagcggcttc

SEQ ID NO: 38888 - RNA, 21 nt, RNAi
gccacaguaaagcggcuucuu

SEQ ID NO: 38889 - RNA, 21 nt, RNAi
uucggugucauuucgccgaag

SEQ ID NO: 38890 - DNA, 21 bp, homo sapiens
aaatgctgtgcggagttcttc

SEQ ID NO: 38891 - RNA, 21 nt, RNAi
augcugugcggaguucuucuu

SEQ ID NO: 38892 - RNA, 21 nt, RNAi
uuuacgacacgccucaagaag

SEQ ID NO: 38893 - DNA, 21 bp, homo sapiens
aatgctgtgcggagttcttca

SEQ ID NO: 38894 - RNA, 21 nt, RNAi
ugcugugcggaguucuucauu

SEQ ID NO: 38895 - RNA, 21 nt, RNAi
uuacgacacgccucaagaagu

SEQ ID NO: 38896 - DNA, 21 bp, homo sapiens
aaatccacctgtcctcatcat

SEQ ID NO: 38897 - RNA, 21 nt, RNAi
auccaccuguccucaucauuu

SEQ ID NO: 38898 - RNA, 21 nt, RNAi
uuuagguggacaggaguagua

SEQ ID NO: 38899 - DNA, 21 bp, homo sapiens
aatccacctgtcctcatcatg

SEQ ID NO: 38900 - RNA, 21 nt, RNAi
uccaccuguccucaucauguu

SEQ ID NO: 38901 - RNA, 21 nt, RNAi
uuagguggacaggaguaguac

SEQ ID NO: 38902 - DNA, 21 bp, homo sapiens
aagacttctccggagctgtac

SEQ ID NO: 38903 - RNA, 21 nt, RNAi
gacuucuccggagcuguacuu

SEQ ID NO: 38904 - RNA, 21 nt, RNAi
uucugaagaggccucgacaug

SEQ ID NO: 38905 - DNA, 21 bp, homo sapiens
aatggcggcagctcagaggac

SEQ ID NO: 38906 - RNA, 21 nt, RNAi
uggcggcagcucagaggacuu

SEQ ID NO: 38907 - RNA, 21 nt, RNAi
uuaccgccgucgagucuccug

SEQ ID NO: 38908 - DNA, 21 bp, homo sapiens
aaggagaagccggatgcggag

SEQ ID NO: 38909 - RNA, 21 nt, RNAi
ggagaagccggaugcggaguu

SEQ ID NO: 38910 - RNA, 21 nt, RNAi
uuccucuucggccuacgccuc

SEQ ID NO: 38911 - DNA, 21 bp, homo sapiens
aagccggatgcggagtctgtg

SEQ ID NO: 38912 - RNA, 21 nt, RNAi
gccggaugcggagucuguguu

SEQ ID NO: 38913 - RNA, 21 nt, RNAi
uucggccuacgccucagacac

SEQ ID NO: 38914 - DNA, 21 bp, homo sapiens
aagctatttagccaaaggcaa

SEQ ID NO: 38915 - RNA, 21 nt, RNAi
gcuauuuagccaaaggcaauu

SEQ ID NO: 38916 - RNA, 21 nt, RNAi
uucgauaaaucgguuuccguu

SEQ ID NO: 38917 - DNA, 21 bp, homo sapiens
aaaggcaaagtggccaacact

SEQ ID NO: 38918 - RNA, 21 nt, RNAi
aggcaaaguggccaacacuuu

SEQ ID NO: 38919 - RNA, 21 nt, RNAi
uuuccguuucaccgguuguga

SEQ ID NO: 38920 - DNA, 21 bp, homo sapiens
aaggcaaagtggccaacacta

SEQ ID NO: 38921 - RNA, 21 nt, RNAi
ggcaaaguggccaacacuauu

SEQ ID NO: 38922 - RNA, 21 nt, RNAi
uuccguuucaccgguugugau

SEQ ID NO: 38923 - DNA, 21 bp, homo sapiens
aaagtggccaacactaatgtg

SEQ ID NO: 38924 - RNA, 21 nt, RNAi
aguggccaacacuaauguguu

SEQ ID NO: 38925 - RNA, 21 nt, RNAi
uuucaccgguugugauuacac

SEQ ID NO: 38926 - DNA, 21 bp, homo sapiens
aagtggccaacactaatgtga

SEQ ID NO: 38927 - RNA, 21 nt, RNAi
guggccaacacuaaugugauu

SEQ ID NO: 38928 - RNA, 21 nt, RNAi
uucaccgguugugauuacacu

SEQ ID NO: 38929 - DNA, 21 bp, homo sapiens
aacactaatgtgaccttgcag

SEQ ID NO: 38930 - RNA, 21 nt, RNAi
cacuaaugugaccuugcaguu

SEQ ID NO: 38931 - RNA, 21 nt, RNAi
uugugauuacacuggaacguc

SEQ ID NO: 38932 - DNA, 21 bp, homo sapiens
aatgtgaccttgcaggcacta

SEQ ID NO: 38933 - RNA, 21 nt, RNAi
ugugaccuugcaggcacuauu

SEQ ID NO: 38934 - RNA, 21 nt, RNAi
uuacacuggaacguccgugau

SEQ ID NO: 38935 - DNA, 21 bp, homo sapiens
aaggtggcggtgaatcagcgg

SEQ ID NO: 38936 - RNA, 21 nt, RNAi
gguggcggugaaucagcgguu

SEQ ID NO: 38937 - RNA, 21 nt, RNAi
uuccaccgccacuuagucgcc

SEQ ID NO: 38938 - DNA, 21 bp, homo sapiens
aatcagcggagcgcggatgca

SEQ ID NO: 38939 - RNA, 21 nt, RNAi
ucagcggagcgcggaugcauu

SEQ ID NO: 38940 - RNA, 21 nt, RNAi
uuagucgccucgcgccuacgu

SEQ ID NO: 38941 - DNA, 21 bp, homo sapiens
aaagctggaagccaaggtctg

SEQ ID NO: 38942 - RNA, 21 nt, RNAi
agcuggaagccaaggucuguu

SEQ ID NO: 38943 - RNA, 21 nt, RNAi
uuucgaccuucgguuccagac

SEQ ID NO: 38944 - DNA, 21 bp, homo sapiens
aagctggaagccaaggtctgt

SEQ ID NO: 38945 - RNA, 21 nt, RNAi
gcuggaagccaaggucuguuu

SEQ ID NO: 38946 - RNA, 21 nt, RNAi
uucgaccuucgguuccagaca

SEQ ID NO: 38947 - DNA, 21 bp, homo sapiens
aagccaaggtctgtctctgga

SEQ ID NO: 38948 - RNA, 21 nt, RNAi
gccaaggucugucucuggauu

SEQ ID NO: 38949 - RNA, 21 nt, RNAi
uucgguuccagacagagaccu

SEQ ID NO: 38950 - DNA, 21 bp, homo sapiens
aaggtctgtctctggatgcct

SEQ ID NO: 38951 - RNA, 21 nt, RNAi
ggucugucucuggaugccuuu

SEQ ID NO: 38952 - RNA, 21 nt, RNAi
uuccagacagagaccuacgga

SEQ ID NO: 38953 - DNA, 21 bp, homo sapiens
aaacaagccaagctacctcac

SEQ ID NO: 38954 - RNA, 21 nt, RNAi
acaagccaagcuaccucacuu

SEQ ID NO: 38955 - RNA, 21 nt, RNAi
uuuguucgguucgauggagug

SEQ ID NO: 38956 - DNA, 21 bp, homo sapiens
aacaagccaagctacctcacg

SEQ ID NO: 38957 - RNA, 21 nt, RNAi
caagccaagcuaccucacguu

SEQ ID NO: 38958 - RNA, 21 nt, RNAi
uuguucgguucgauggagugc

SEQ ID NO: 38959 - DNA, 21 bp, homo sapiens
aagccaagctacctcacgcca

SEQ ID NO: 38960 - RNA, 21 nt, RNAi
gccaagcuaccucacgccauu

SEQ ID NO: 38961 - RNA, 21 nt, RNAi
uucgguucgauggagugcggu

SEQ ID NO: 38962 - DNA, 21 bp, homo sapiens
aagctacctcacgccaacatc

SEQ ID NO: 38963 - RNA, 21 nt, RNAi
gcuaccucacgccaacaucuu

SEQ ID NO: 38964 - RNA, 21 nt, RNAi
uucgauggagugcgguuguag

SEQ ID NO: 38965 - DNA, 21 bp, homo sapiens
aagccaccgaacatctccgcg

SEQ ID NO: 38966 - RNA, 21 nt, RNAi
gccaccgaacaucuccgcguu

SEQ ID NO: 38967 - RNA, 21 nt, RNAi
uucgguggcuuguagaggcgc

SEQ ID NO: 38968 - DNA, 21 bp, homo sapiens
aacatctccgcggtggatgtc

SEQ ID NO: 38969 - RNA, 21 nt, RNAi
caucuccgcgguggaugucuu

SEQ ID NO: 38970 - RNA, 21 nt, RNAi
uuguagaggcgccaccuacag

SEQ ID NO: 38971 - DNA, 21 bp, homo sapiens
aagcacaagtgtaagtactgt

SEQ ID NO: 38972 - RNA, 21 nt, RNAi
gcacaaguguaaguacuguuu

SEQ ID NO: 38973 - RNA, 21 nt, RNAi
uucguguucacauucaugaca

SEQ ID NO: 38974 - DNA, 21 bp, homo sapiens
aagtgtaagtactgtagcaag

SEQ ID NO: 38975 - RNA, 21 nt, RNAi
guguaaguacuguagcaaguu

SEQ ID NO: 38976 - RNA, 21 nt, RNAi
uucacauucaugacaucguuc

SEQ ID NO: 38977 - DNA, 21 bp, homo sapiens
aacctcaaggtgcactttcac

SEQ ID NO: 38978 - RNA, 21 nt, RNAi
ccucaaggugcacuuucacuu

SEQ ID NO: 38979 - RNA, 21 nt, RNAi
uuggaguuccacgugaaagug

SEQ ID NO: 38980 - DNA, 21 bp, homo sapiens
aaggtgcactttcaccgacat

SEQ ID NO: 38981 - RNA, 21 nt, RNAi
ggugcacuuucaccgacauuu

SEQ ID NO: 38982 - RNA, 21 nt, RNAi
uuccacgugaaaguggcugua

SEQ ID NO: 38983 - DNA, 21 bp, homo sapiens
aaccgagtctttctttagaca

SEQ ID NO: 38984 - RNA, 21 nt, RNAi
ccgagucuuucuuuagacauu

SEQ ID NO: 38985 - RNA, 21 nt, RNAi
uuggcucagaaagaaaucugu

SEQ ID NO: 38986 - DNA, 21 bp, homo sapiens
aaacctgtccttgtaaccacc

SEQ ID NO: 38987 - RNA, 21 nt, RNAi
accuguccuuguaaccaccuu

SEQ ID NO: 38988 - RNA, 21 nt, RNAi
uuuggacaggaacauuggugg

SEQ ID NO: 38989 - DNA, 21 bp, homo sapiens
aacctgtccttgtaaccacct

SEQ ID NO: 38990 - RNA, 21 nt, RNAi
ccuguccuuguaaccaccuuu

SEQ ID NO: 38991 - RNA, 21 nt, RNAi
uuggacaggaacauuggugga

SEQ ID NO: 38992 - DNA, 21 bp, homo sapiens
aaattgcagcagttggtggag

SEQ ID NO: 38993 - RNA, 21 nt, RNAi
auugcagcaguugguggaguu

SEQ ID NO: 38994 - RNA, 21 nt, RNAi
uuuaacgucgucaaccaccuc

SEQ ID NO: 38995 - DNA, 21 bp, homo sapiens
aattgcagcagttggtggaga

SEQ ID NO: 38996 - RNA, 21 nt, RNAi
uugcagcaguugguggagauu

SEQ ID NO: 38997 - RNA, 21 nt, RNAi
uuaacgucgucaaccaccucu

SEQ ID NO: 38998 - DNA, 21 bp, homo sapiens
aacattgacaaggccaccact

SEQ ID NO: 38999 - RNA, 21 nt, RNAi
cauugacaaggccaccacuuu

SEQ ID NO: 39000 - RNA, 21 nt, RNAi
uuguaacuguuccggugguga

SEQ ID NO: 39001 - DNA, 21 bp, homo sapiens
aacgaatgtctcatttgccac

SEQ ID NO: 39002 - RNA, 21 nt, RNAi
cgaaugucucauuugccacuu

SEQ ID NO: 39003 - RNA, 21 nt, RNAi
uugcuuacagaguaaacggug

SEQ ID NO: 39004 - DNA, 21 bp, homo sapiens
aatgtctcatttgccaccgag

SEQ ID NO: 39005 - RNA, 21 nt, RNAi
ugucucauuugccaccgaguu

SEQ ID NO: 39006 - RNA, 21 nt, RNAi
uuacagaguaaacgguggcuc

SEQ ID NO: 39007 - DNA, 21 bp, homo sapiens
aagatctgtggccgagccttt

SEQ ID NO: 39008 - RNA, 21 nt, RNAi
gaucuguggccgagccuuuuu

SEQ ID NO: 39009 - RNA, 21 nt, RNAi
uucuagacaccggcucggaaa

SEQ ID NO: 39010 - DNA, 21 bp, homo sapiens
aaaggtaacctgaagacacac

SEQ ID NO: 39011 - RNA, 21 nt, RNAi
agguaaccugaagacacacuu

SEQ ID NO: 39012 - RNA, 21 nt, RNAi
uuuccauuggacuucugugug

SEQ ID NO: 39013 - DNA, 21 bp, homo sapiens
aaggtaacctgaagacacacc

SEQ ID NO: 39014 - RNA, 21 nt, RNAi
gguaaccugaagacacaccuu

SEQ ID NO: 39015 - RNA, 21 nt, RNAi
uuccauuggacuucugugugg

SEQ ID NO: 39016 - DNA, 21 bp, homo sapiens
aaccaacacatccattaagac

SEQ ID NO: 39017 - RNA, 21 nt, RNAi
ccaacacauccauuaagacuu

SEQ ID NO: 39018 - RNA, 21 nt, RNAi
uugguuguguagguaauucug

SEQ ID NO: 39019 - DNA, 21 bp, homo sapiens
aacacatccattaagacgcag

SEQ ID NO: 39020 - RNA, 21 nt, RNAi
cacauccauuaagacgcaguu

SEQ ID NO: 39021 - RNA, 21 nt, RNAi
uuguguagguaauucugcguc

SEQ ID NO: 39022 - DNA, 21 bp, homo sapiens
aagaagttcactaatgccgtg

SEQ ID NO: 39023 - RNA, 21 nt, RNAi
gaaguucacuaaugccguguu

SEQ ID NO: 39024 - RNA, 21 nt, RNAi
uucuucaagugauuacggcac

SEQ ID NO: 39025 - DNA, 21 bp, homo sapiens
aagttcactaatgccgtgatg

SEQ ID NO: 39026 - RNA, 21 nt, RNAi
guucacuaaugccgugauguu

SEQ ID NO: 39027 - RNA, 21 nt, RNAi
uucaagugauuacggcacuac

SEQ ID NO: 39028 - DNA, 21 bp, homo sapiens
aatgccgtgatgctgcagcaa

SEQ ID NO: 39029 - RNA, 21 nt, RNAi
ugccgugaugcugcagcaauu

SEQ ID NO: 39030 - RNA, 21 nt, RNAi
uuacggcacuacgacgucguu

SEQ ID NO: 39031 - DNA, 21 bp, homo sapiens
aacatattcggatgcacatgg

SEQ ID NO: 39032 - RNA, 21 nt, RNAi
cauauucggaugcacaugguu

SEQ ID NO: 39033 - RNA, 21 nt, RNAi
uuguauaagccuacguguacc

SEQ ID NO: 39034 - DNA, 21 bp, homo sapiens
aaagcatcgatgtagaggaag

SEQ ID NO: 39035 - RNA, 21 nt, RNAi
agcaucgauguagaggaaguu

SEQ ID NO: 39036 - RNA, 21 nt, RNAi
uuucguagcuacaucuccuuc

SEQ ID NO: 39037 - DNA, 21 bp, homo sapiens
aagcatcgatgtagaggaagt

SEQ ID NO: 39038 - RNA, 21 nt, RNAi
gcaucgauguagaggaaguuu

SEQ ID NO: 39039 - RNA, 21 nt, RNAi
uucguagcuacaucuccuuca

SEQ ID NO: 39040 - DNA, 21 bp, homo sapiens
aaacggttccgtggagagcga

SEQ ID NO: 39041 - RNA, 21 nt, RNAi
acgguuccguggagagcgauu

SEQ ID NO: 39042 - RNA, 21 nt, RNAi
uuugccaaggcaccucucgcu

SEQ ID NO: 39043 - DNA, 21 bp, homo sapiens
aacggttccgtggagagcgat

SEQ ID NO: 39044 - RNA, 21 nt, RNAi
cgguuccguggagagcgauuu

SEQ ID NO: 39045 - RNA, 21 nt, RNAi
uugccaaggcaccucucgcua

SEQ ID NO: 39046 - DNA, 21 bp, homo sapiens
aacgactcatcctcgctgatg

SEQ ID NO: 39047 - RNA, 21 nt, RNAi
cgacucauccucgcugauguu

SEQ ID NO: 39048 - RNA, 21 nt, RNAi
uugcugaguaggagcgacuac

SEQ ID NO: 39049 - DNA, 21 bp, homo sapiens
aaaccacatccttccaggcac

SEQ ID NO: 39050 - RNA, 21 nt, RNAi
accacauccuuccaggcacuu

SEQ ID NO: 39051 - RNA, 21 nt, RNAi
uuugguguaggaagguccgug

SEQ ID NO: 39052 - DNA, 21 bp, homo sapiens
aaccacatccttccaggcact

SEQ ID NO: 39053 - RNA, 21 nt, RNAi
ccacauccuuccaggcacuuu

SEQ ID NO: 39054 - RNA, 21 nt, RNAi
uugguguaggaagguccguga

SEQ ID NO: 39055 - DNA, 21 bp, homo sapiens
aatagtcaagccgaaagcatc

SEQ ID NO: 39056 - RNA, 21 nt, RNAi
uagucaagccgaaagcaucuu

SEQ ID NO: 39057 - RNA, 21 nt, RNAi
uuaucaguucggcuuucguag

SEQ ID NO: 39058 - DNA, 21 bp, homo sapiens
aagccgaaagcatcaagtcaa

SEQ ID NO: 39059 - RNA, 21 nt, RNAi
gccgaaagcaucaagucaauu

SEQ ID NO: 39060 - RNA, 21 nt, RNAi
uucggcuuucguaguucaguu

SEQ ID NO: 39061 - DNA, 21 bp, homo sapiens
aaagcatcaagtcaaagtctc

SEQ ID NO: 39062 - RNA, 21 nt, RNAi
agcaucaagucaaagucucuu

SEQ ID NO: 39063 - RNA, 21 nt, RNAi
uuucguaguucaguuucagag

SEQ ID NO: 39064 - DNA, 21 bp, homo sapiens
aagcatcaagtcaaagtctcc

SEQ ID NO: 39065 - RNA, 21 nt, RNAi
gcaucaagucaaagucuccuu

SEQ ID NO: 39066 - RNA, 21 nt, RNAi
uucguaguucaguuucagagg

SEQ ID NO: 39067 - DNA, 21 bp, homo sapiens
aaagcagagagctccgagaac

SEQ ID NO: 39068 - RNA, 21 nt, RNAi
agcagagagcuccgagaacuu

SEQ ID NO: 39069 - RNA, 21 nt, RNAi
uuucgucucucgaggcucuug

SEQ ID NO: 39070 - DNA, 21 bp, homo sapiens
aagcagagagctccgagaaca

SEQ ID NO: 39071 - RNA, 21 nt, RNAi
gcagagagcuccgagaacauu

SEQ ID NO: 39072 - RNA, 21 nt, RNAi
uucgucucucgaggcucuugu

SEQ ID NO: 39073 - DNA, 21 bp, homo sapiens
aacagccgcactgagatggaa

SEQ ID NO: 39074 - RNA, 21 nt, RNAi
cagccgcacugagauggaauu

SEQ ID NO: 39075 - RNA, 21 nt, RNAi
uugucggcgugacucuaccuu

SEQ ID NO: 39076 - DNA, 21 bp, homo sapiens
aaggttgaagttcctggcaca

SEQ ID NO: 39077 - RNA, 21 nt, RNAi
gguugaaguuccuggcacauu

SEQ ID NO: 39078 - RNA, 21 nt, RNAi
uuccaacuucaaggaccgugu

SEQ ID NO: 39079 - DNA, 21 bp, homo sapiens
aagttcctggcacatttgtgg

SEQ ID NO: 39080 - RNA, 21 nt, RNAi
guuccuggcacauuugugguu

SEQ ID NO: 39081 - RNA, 21 nt, RNAi
uucaaggaccguguaaacacc

SEQ ID NO: 39082 - DNA, 21 bp, homo sapiens
aagcaacatggctgcacacgg

SEQ ID NO: 39083 - RNA, 21 nt, RNAi
gcaacauggcugcacacgguu

SEQ ID NO: 39084 - RNA, 21 nt, RNAi
uucguuguaccgacgugugcc

SEQ ID NO: 39085 - DNA, 21 bp, homo sapiens
aacatggctgcacacggtgtg

SEQ ID NO: 39086 - RNA, 21 nt, RNAi
cauggcugcacacgguguguu

SEQ ID NO: 39087 - RNA, 21 nt, RNAi
uuguaccgacgugugccacac

SEQ ID NO: 39088 - DNA, 21 bp, homo sapiens
aagaacttctcgtctgctagc

SEQ ID NO: 39089 - RNA, 21 nt, RNAi
gaacuucucgucugcuagcuu

SEQ ID NO: 39090 - RNA, 21 nt, RNAi
uucuugaagagcagacgaucg

SEQ ID NO: 39091 - DNA, 21 bp, homo sapiens
aacttctcgtctgctagcgct

SEQ ID NO: 39092 - RNA, 21 nt, RNAi
cuucucgucugcuagcgcuuu

SEQ ID NO: 39093 - RNA, 21 nt, RNAi
uugaagagcagacgaucgcga

SEQ ID NO: 39094 - DNA, 21 bp, homo sapiens
aaaggcaacttaaaggttcac

SEQ ID NO: 39095 - RNA, 21 nt, RNAi
aggcaacuuaaagguucacuu

SEQ ID NO: 39096 - RNA, 21 nt, RNAi
uuuccguugaauuuccaagug

SEQ ID NO: 39097 - DNA, 21 bp, homo sapiens
aaggcaacttaaaggttcact

SEQ ID NO: 39098 - RNA, 21 nt, RNAi
ggcaacuuaaagguucacuuu

SEQ ID NO: 39099 - RNA, 21 nt, RNAi
uuccguugaauuuccaaguga

SEQ ID NO: 39100 - DNA, 21 bp, homo sapiens
aacttaaaggttcactacatg

SEQ ID NO: 39101 - RNA, 21 nt, RNAi
cuuaaagguucacuacauguu

SEQ ID NO: 39102 - RNA, 21 nt, RNAi
uugaauuuccaagugauguac

SEQ ID NO: 39103 - DNA, 21 bp, homo sapiens
aaaggttcactacatgacaca

SEQ ID NO: 39104 - RNA, 21 nt, RNAi
agguucacuacaugacacauu

SEQ ID NO: 39105 - RNA, 21 nt, RNAi
uuuccaagugauguacugugu

SEQ ID NO: 39106 - DNA, 21 bp, homo sapiens
aaggttcactacatgacacac

SEQ ID NO: 39107 - RNA, 21 nt, RNAi
gguucacuacaugacacacuu

SEQ ID NO: 39108 - RNA, 21 nt, RNAi
uuccaagugauguacugugug

SEQ ID NO: 39109 - DNA, 21 bp, homo sapiens
aaggaagttggccatcgagaa

SEQ ID NO: 39110 - RNA, 21 nt, RNAi
ggaaguuggccaucgagaauu

SEQ ID NO: 39111 - RNA, 21 nt, RNAi
uuccuucaaccgguagcucuu

SEQ ID NO: 39112 - DNA, 21 bp, homo sapiens
aagttggccatcgagaacacc

SEQ ID NO: 39113 - RNA, 21 nt, RNAi
guuggccaucgagaacaccuu

SEQ ID NO: 39114 - RNA, 21 nt, RNAi
uucaaccgguagcucuugugg

SEQ ID NO: 39115 - DNA, 21 bp, homo sapiens
aacaccatggctctgttaggt

SEQ ID NO: 39116 - RNA, 21 nt, RNAi
caccauggcucuguuagguuu

SEQ ID NO: 39117 - RNA, 21 nt, RNAi
uugugguaccgagacaaucca

SEQ ID NO: 39118 - DNA, 21 bp, homo sapiens
aaagagtctcagaaatctttc

SEQ ID NO: 39119 - RNA, 21 nt, RNAi
agagucucagaaaucuuucuu

SEQ ID NO: 39120 - RNA, 21 nt, RNAi
uuucucagagucuuuagaaag

SEQ ID NO: 39121 - DNA, 21 bp, homo sapiens
aagagtctcagaaatctttcc

SEQ ID NO: 39122 - RNA, 21 nt, RNAi
gagucucagaaaucuuuccuu

SEQ ID NO: 39123 - RNA, 21 nt, RNAi
uucucagagucuuuagaaagg

SEQ ID NO: 39124 - DNA, 21 bp, homo sapiens
aaccagtacaccagcatgctc

SEQ ID NO: 39125 - RNA, 21 nt, RNAi
ccaguacaccagcaugcucuu

SEQ ID NO: 39126 - RNA, 21 nt, RNAi
uuggucauguggucguacgag

SEQ ID NO: 39127 - DNA, 21 bp, homo sapiens
aatggcggtctggccgtgaag

SEQ ID NO: 39128 - RNA, 21 nt, RNAi
uggcggucuggccgugaaguu

SEQ ID NO: 39129 - RNA, 21 nt, RNAi
uuaccgccagaccggcacuuc

SEQ ID NO: 39130 - DNA, 21 bp, homo sapiens
aagaccaatgagatctctgtg

SEQ ID NO: 39131 - RNA, 21 nt, RNAi
gaccaaugagaucucuguguu

SEQ ID NO: 39132 - RNA, 21 nt, RNAi
uucugguuacucuagagacac

SEQ ID NO: 39133 - DNA, 21 bp, homo sapiens
aatgagatctctgtgatccag

SEQ ID NO: 39134 - RNA, 21 nt, RNAi
ugagaucucugugauccaguu

SEQ ID NO: 39135 - RNA, 21 nt, RNAi
uuacucuagagacacuagguc

SEQ ID NO: 39136 - DNA, 21 bp, homo sapiens
aataacgccactgtctccaag

SEQ ID NO: 39137 - RNA, 21 nt, RNAi
uaacgccacugucuccaaguu

SEQ ID NO: 39138 - RNA, 21 nt, RNAi
uuauugcggugacagagguuc

SEQ ID NO: 39139 - DNA, 21 bp, homo sapiens
aacgccactgtctccaagatg

SEQ ID NO: 39140 - RNA, 21 nt, RNAi
cgccacugucuccaagauguu

SEQ ID NO: 39141 - RNA, 21 nt, RNAi
uugcggugacagagguucuac

SEQ ID NO: 39142 - DNA, 21 bp, homo sapiens
aaaccaagtgctactgacggc

SEQ ID NO: 39143 - RNA, 21 nt, RNAi
accaagugcuacugacggcuu

SEQ ID NO: 39144 - RNA, 21 nt, RNAi
uuugguucacgaugacugccg

SEQ ID NO: 39145 - DNA, 21 bp, homo sapiens
aaccaagtgctactgacggcg

SEQ ID NO: 39146 - RNA, 21 nt, RNAi
ccaagugcuacugacggcguu

SEQ ID NO: 39147 - RNA, 21 nt, RNAi
uugguucacgaugacugccgc

SEQ ID NO: 39148 - DNA, 21 bp, homo sapiens
aagtgctactgacggcgttcc

SEQ ID NO: 39149 - RNA, 21 nt, RNAi
gugcuacugacggcguuccuu

SEQ ID NO: 39150 - RNA, 21 nt, RNAi
uucacgaugacugccgcaagg

SEQ ID NO: 39151 - DNA, 21 bp, homo sapiens
aaacaccagtttcctcacttc

SEQ ID NO: 39152 - RNA, 21 nt, RNAi
acaccaguuuccucacuucuu

SEQ ID NO: 39153 - RNA, 21 nt, RNAi
uuuguggucaaaggagugaag

SEQ ID NO: 39154 - DNA, 21 bp, homo sapiens
aacaccagtttcctcacttcc

SEQ ID NO: 39155 - RNA, 21 nt, RNAi
caccaguuuccucacuuccuu

SEQ ID NO: 39156 - RNA, 21 nt, RNAi
uuguggucaaaggagugaagg

SEQ ID NO: 39157 - DNA, 21 bp, homo sapiens
cagcacatcaactcggaggag

SEQ ID NO: 39158 - RNA, 21 nt, RNAi
gcacaucaacucggaggaguu

SEQ ID NO: 39159 - RNA, 21 nt, RNAi
uucguguaguugagccuccuc

SEQ ID NO: 39160 - DNA, 21 bp, homo sapiens
cacatcaactcggaggaggac

SEQ ID NO: 39161 - RNA, 21 nt, RNAi
caucaacucggaggaggacuu

SEQ ID NO: 39162 - RNA, 21 nt, RNAi
uuguaguugagccuccuccug

SEQ ID NO: 39163 - DNA, 21 bp, homo sapiens
catcaactcggaggaggacca

SEQ ID NO: 39164 - RNA, 21 nt, RNAi
ucaacucggaggaggaccauu

SEQ ID NO: 39165 - RNA, 21 nt, RNAi
uuaguugagccuccuccuggu

SEQ ID NO: 39166 - DNA, 21 bp, homo sapiens
cacagtaaagcggcttcgtcg

SEQ ID NO: 39167 - RNA, 21 nt, RNAi
caguaaagcggcuucgucguu

SEQ ID NO: 39168 - RNA, 21 nt, RNAi
uugucauuucgccgaagcagc

SEQ ID NO: 39169 - DNA, 21 bp, homo sapiens
cacgtctgtgagaaatgctgt

SEQ ID NO: 39170 - RNA, 21 nt, RNAi
cgucugugagaaaugcuguuu

SEQ ID NO: 39171 - RNA, 21 nt, RNAi
uugcagacacucuuuacgaca

SEQ ID NO: 39172 - DNA, 21 bp, homo sapiens
cagcatctctgagttcctgga

SEQ ID NO: 39173 - RNA, 21 nt, RNAi
gcaucucugaguuccuggauu

SEQ ID NO: 39174 - RNA, 21 nt, RNAi
uucguagagacucaaggaccu

SEQ ID NO: 39175 - DNA, 21 bp, homo sapiens
catctctgagttcctggaaca

SEQ ID NO: 39176 - RNA, 21 nt, RNAi
ucucugaguuccuggaacauu

SEQ ID NO: 39177 - RNA, 21 nt, RNAi
uuagagacucaaggaccuugu

SEQ ID NO: 39178 - DNA, 21 bp, homo sapiens
cacctgtcctcatcatgaatg

SEQ ID NO: 39179 - RNA, 21 nt, RNAi
ccuguccucaucaugaauguu

SEQ ID NO: 39180 - RNA, 21 nt, RNAi
uuggacaggaguaguacuuac

SEQ ID NO: 39181 - DNA, 21 bp, homo sapiens
cagaagacttctccggagctg

SEQ ID NO: 39182 - RNA, 21 nt, RNAi
gaagacuucuccggagcuguu

SEQ ID NO: 39183 - RNA, 21 nt, RNAi
uucuucugaagaggccucgac

SEQ ID NO: 39184 - DNA, 21 bp, homo sapiens
cagctcagaggacatgaagga

SEQ ID NO: 39185 - RNA, 21 nt, RNAi
gcucagaggacaugaaggauu

SEQ ID NO: 39186 - RNA, 21 nt, RNAi
uucgagucuccuguacuuccu

SEQ ID NO: 39187 - DNA, 21 bp, homo sapiens
cagaggacatgaaggagaagc

SEQ ID NO: 39188 - RNA, 21 nt, RNAi
gaggacaugaaggagaagcuu

SEQ ID NO: 39189 - RNA, 21 nt, RNAi
uucuccuguacuuccucuucg

SEQ ID NO: 39190 - DNA, 21 bp, homo sapiens
catgaaggagaagccggatgc

SEQ ID NO: 39191 - RNA, 21 nt, RNAi
ugaaggagaagccggaugcuu

SEQ ID NO: 39192 - RNA, 21 nt, RNAi
uuacuuccucuucggccuacg

SEQ ID NO: 39193 - DNA, 21 bp, homo sapiens
caggacataagctatttagcc

SEQ ID NO: 39194 - RNA, 21 nt, RNAi
ggacauaagcuauuuagccuu

SEQ ID NO: 39195 - RNA, 21 nt, RNAi
uuccuguauucgauaaaucgg

SEQ ID NO: 39196 - DNA, 21 bp, homo sapiens
cataagctatttagccaaagg

SEQ ID NO: 39197 - RNA, 21 nt, RNAi
uaagcuauuuagccaaagguu

SEQ ID NO: 39198 - RNA, 21 nt, RNAi
uuauucgauaaaucgguuucc

SEQ ID NO: 39199 - DNA, 21 bp, homo sapiens
caaaggcaaagtggccaacac

SEQ ID NO: 39200 - RNA, 21 nt, RNAi
aaggcaaaguggccaacacuu

SEQ ID NO: 39201 - RNA, 21 nt, RNAi
uuuuccguuucaccgguugug

SEQ ID NO: 39202 - DNA, 21 bp, homo sapiens
caaagtggccaacactaatgt

SEQ ID NO: 39203 - RNA, 21 nt, RNAi
aaguggccaacacuaauguuu

SEQ ID NO: 39204 - RNA, 21 nt, RNAi
uuuucaccgguugugauuaca

SEQ ID NO: 39205 - DNA, 21 bp, homo sapiens
caacactaatgtgaccttgca

SEQ ID NO: 39206 - RNA, 21 nt, RNAi
acacuaaugugaccuugcauu

SEQ ID NO: 39207 - RNA, 21 nt, RNAi
uuugugauuacacuggaacgu

SEQ ID NO: 39208 - DNA, 21 bp, homo sapiens
cactaatgtgaccttgcaggc

SEQ ID NO: 39209 - RNA, 21 nt, RNAi
cuaaugugaccuugcaggcuu

SEQ ID NO: 39210 - RNA, 21 nt, RNAi
uugauuacacuggaacguccg

SEQ ID NO: 39211 - DNA, 21 bp, homo sapiens
caccaaggtggcggtgaatca

SEQ ID NO: 39212 - RNA, 21 nt, RNAi
ccaagguggcggugaaucauu

SEQ ID NO: 39213 - RNA, 21 nt, RNAi
uugguuccaccgccacuuagu

SEQ ID NO: 39214 - DNA, 21 bp, homo sapiens
caaggtggcggtgaatcagcg

SEQ ID NO: 39215 - RNA, 21 nt, RNAi
agguggcggugaaucagcguu

SEQ ID NO: 39216 - RNA, 21 nt, RNAi
uuuccaccgccacuuagucgc

SEQ ID NO: 39217 - DNA, 21 bp, homo sapiens
cagatcttgtgtctgcagcag

SEQ ID NO: 39218 - RNA, 21 nt, RNAi
gaucuugugucugcagcaguu

SEQ ID NO: 39219 - RNA, 21 nt, RNAi
uucuagaacacagacgucguc

SEQ ID NO: 39220 - DNA, 21 bp, homo sapiens
cagcagcagcagctacagcag

SEQ ID NO: 39221 - RNA, 21 nt, RNAi
gcagcagcagcuacagcaguu

SEQ ID NO: 39222 - RNA, 21 nt, RNAi
uucgucgucgucgaugucguc

SEQ ID NO: 39223 - DNA, 21 bp, homo sapiens
cagcagcagctacagcagatc

SEQ ID NO: 39224 - RNA, 21 nt, RNAi
gcagcagcuacagcagaucuu

SEQ ID NO: 39225 - RNA, 21 nt, RNAi
uucgucgucgaugucgucuag

SEQ ID NO: 39226 - DNA, 21 bp, homo sapiens
cagcagctacagcagatccag

SEQ ID NO: 39227 - RNA, 21 nt, RNAi
gcagcuacagcagauccaguu

SEQ ID NO: 39228 - RNA, 21 nt, RNAi
uucgucgaugucgucuagguc

SEQ ID NO: 39229 - DNA, 21 bp, homo sapiens
cagctacagcagatccagctc

SEQ ID NO: 39230 - RNA, 21 nt, RNAi
gcuacagcagauccagcucuu

SEQ ID NO: 39231 - RNA, 21 nt, RNAi
uucgaugucgucuaggucgag

SEQ ID NO: 39232 - DNA, 21 bp, homo sapiens
cagcagatccagctcaccgag

SEQ ID NO: 39233 - RNA, 21 nt, RNAi
gcagauccagcucaccgaguu

SEQ ID NO: 39234 - RNA, 21 nt, RNAi
uucgucuaggucgaguggcuc

SEQ ID NO: 39235 - DNA, 21 bp, homo sapiens
cagatccagctcaccgagcag

SEQ ID NO: 39236 - RNA, 21 nt, RNAi
gauccagcucaccgagcaguu

SEQ ID NO: 39237 - RNA, 21 nt, RNAi
uucuaggucgaguggcucguc

SEQ ID NO: 39238 - DNA, 21 bp, homo sapiens
caccgagcagatccgcatcca

SEQ ID NO: 39239 - RNA, 21 nt, RNAi
ccgagcagauccgcauccauu

SEQ ID NO: 39240 - RNA, 21 nt, RNAi
uuggcucgucuaggcguaggu

SEQ ID NO: 39241 - DNA, 21 bp, homo sapiens
cagatccgcatccaggtgaac

SEQ ID NO: 39242 - RNA, 21 nt, RNAi
gauccgcauccaggugaacuu

SEQ ID NO: 39243 - RNA, 21 nt, RNAi
uucuaggcguagguccacuug

SEQ ID NO: 39244 - DNA, 21 bp, homo sapiens
cagccacatgtctcagcaggt

SEQ ID NO: 39245 - RNA, 21 nt, RNAi
gccacaugucucagcagguuu

SEQ ID NO: 39246 - RNA, 21 nt, RNAi
uucgguguacagagucgucca

SEQ ID NO: 39247 - DNA, 21 bp, homo sapiens
cacatgtctcagcaggtttct

SEQ ID NO: 39248 - RNA, 21 nt, RNAi
caugucucagcagguuucuuu

SEQ ID NO: 39249 - RNA, 21 nt, RNAi
uuguacagagucguccaaaga

SEQ ID NO: 39250 - DNA, 21 bp, homo sapiens
catgtctcagcaggtttctgc

SEQ ID NO: 39251 - RNA, 21 nt, RNAi
ugucucagcagguuucugcuu

SEQ ID NO: 39252 - RNA, 21 nt, RNAi
uuacagagucguccaaagacg

SEQ ID NO: 39253 - DNA, 21 bp, homo sapiens
cagcaggtttctgcagctgtg

SEQ ID NO: 39254 - RNA, 21 nt, RNAi
gcagguuucugcagcuguguu

SEQ ID NO: 39255 - RNA, 21 nt, RNAi
uucguccaaagacgucgacac

SEQ ID NO: 39256 - DNA, 21 bp, homo sapiens
caggtttctgcagctgtggct

SEQ ID NO: 39257 - RNA, 21 nt, RNAi
gguuucugcagcuguggcuuu

SEQ ID NO: 39258 - RNA, 21 nt, RNAi
uuccaaagacgucgacaccga

SEQ ID NO: 39259 - DNA, 21 bp, homo sapiens
cagctgtggctttgctcagcc

SEQ ID NO: 39260 - RNA, 21 nt, RNAi
gcuguggcuuugcucagccuu

SEQ ID NO: 39261 - RNA, 21 nt, RNAi
uucgacaccgaaacgagucgg

SEQ ID NO: 39262 - DNA, 21 bp, homo sapiens
cagccagaaagctggaagcca

SEQ ID NO: 39263 - RNA, 21 nt, RNAi
gccagaaagcuggaagccauu

SEQ ID NO: 39264 - RNA, 21 nt, RNAi
uucggucuuucgaccuucggu

SEQ ID NO: 39265 - DNA, 21 bp, homo sapiens
cagaaagctggaagccaaggt

SEQ ID NO: 39266 - RNA, 21 nt, RNAi
gaaagcuggaagccaagguuu

SEQ ID NO: 39267 - RNA, 21 nt, RNAi
uucuuucgaccuucgguucca

SEQ ID NO: 39268 - DNA, 21 bp, homo sapiens
caaggtctgtctctggatgcc

SEQ ID NO: 39269 - RNA, 21 nt, RNAi
aggucugucucuggaugccuu

SEQ ID NO: 39270 - RNA, 21 nt, RNAi
uuuccagacagagaccuacgg

SEQ ID NO: 39271 - DNA, 21 bp, homo sapiens
caagccaagctacctcacgcc

SEQ ID NO: 39272 - RNA, 21 nt, RNAi
agccaagcuaccucacgccuu

SEQ ID NO: 39273 - RNA, 21 nt, RNAi
uuucgguucgauggagugcgg

SEQ ID NO: 39274 - DNA, 21 bp, homo sapiens
caagctacctcacgccaacat

SEQ ID NO: 39275 - RNA, 21 nt, RNAi
agcuaccucacgccaacauuu

SEQ ID NO: 39276 - RNA, 21 nt, RNAi
uuucgauggagugcgguugua

SEQ ID NO: 39277 - DNA, 21 bp, homo sapiens
cactgtggcgctagacacatc

SEQ ID NO: 39278 - RNA, 21 nt, RNAi
cuguggcgcuagacacaucuu

SEQ ID NO: 39279 - RNA, 21 nt, RNAi
uugacaccgcgaucuguguag

SEQ ID NO: 39280 - DNA, 21 bp, homo sapiens
catctccgcggtggatgtcaa

SEQ ID NO: 39281 - RNA, 21 nt, RNAi
ucuccgcgguggaugucaauu

SEQ ID NO: 39282 - RNA, 21 nt, RNAi
uuagaggcgccaccuacaguu

SEQ ID NO: 39283 - DNA, 21 bp, homo sapiens
caagcacaagtgtaagtactg

SEQ ID NO: 39284 - RNA, 21 nt, RNAi
agcacaaguguaaguacuguu

SEQ ID NO: 39285 - RNA, 21 nt, RNAi
uuucguguucacauucaugac

SEQ ID NO: 39286 - DNA, 21 bp, homo sapiens
cacaagtgtaagtactgtagc

SEQ ID NO: 39287 - RNA, 21 nt, RNAi
caaguguaaguacuguagcuu

SEQ ID NO: 39288 - RNA, 21 nt, RNAi
uuguucacauucaugacaucg

SEQ ID NO: 39289 - DNA, 21 bp, homo sapiens
caagtgtaagtactgtagcaa

SEQ ID NO: 39290 - RNA, 21 nt, RNAi
aguguaaguacuguagcaauu

SEQ ID NO: 39291 - RNA, 21 nt, RNAi
uuucacauucaugacaucguu

SEQ ID NO: 39292 - DNA, 21 bp, homo sapiens
caacctcaaggtgcactttca

SEQ ID NO: 39293 - RNA, 21 nt, RNAi
accucaaggugcacuuucauu

SEQ ID NO: 39294 - RNA, 21 nt, RNAi
uuuggaguuccacgugaaagu

SEQ ID NO: 39295 - DNA, 21 bp, homo sapiens
caaggtgcactttcaccgaca

SEQ ID NO: 39296 - RNA, 21 nt, RNAi
aggugcacuuucaccgacauu

SEQ ID NO: 39297 - RNA, 21 nt, RNAi
uuuccacgugaaaguggcugu

SEQ ID NO: 39298 - DNA, 21 bp, homo sapiens
cagctgtttgccgagttccag

SEQ ID NO: 39299 - RNA, 21 nt, RNAi
gcuguuugccgaguuccaguu

SEQ ID NO: 39300 - RNA, 21 nt, RNAi
uucgacaaacggcucaagguc

SEQ ID NO: 39301 - DNA, 21 bp, homo sapiens
catagatgaaccgagtctttc

SEQ ID NO: 39302 - RNA, 21 nt, RNAi
uagaugaaccgagucuuucuu

SEQ ID NO: 39303 - RNA, 21 nt, RNAi
uuaucuacuuggcucagaaag

SEQ ID NO: 39304 - DNA, 21 bp, homo sapiens
cagcaaacctgtccttgtaac

SEQ ID NO: 39305 - RNA, 21 nt, RNAi
gcaaaccuguccuuguaacuu

SEQ ID NO: 39306 - RNA, 21 nt, RNAi
uucguuuggacaggaacauug

SEQ ID NO: 39307 - DNA, 21 bp, homo sapiens
caaacctgtccttgtaaccac

SEQ ID NO: 39308 - RNA, 21 nt, RNAi
aaccuguccuuguaaccacuu

SEQ ID NO: 39309 - RNA, 21 nt, RNAi
uuuuggacaggaacauuggug

SEQ ID NO: 39310 - DNA, 21 bp, homo sapiens
cagcagttggtggagaacatt

SEQ ID NO: 39311 - RNA, 21 nt, RNAi
gcaguugguggagaacauuuu

SEQ ID NO: 39312 - RNA, 21 nt, RNAi
uucgucaaccaccucuuguaa

SEQ ID NO: 39313 - DNA, 21 bp, homo sapiens
cagttggtggagaacattgac

SEQ ID NO: 39314 - RNA, 21 nt, RNAi
guugguggagaacauugacuu

SEQ ID NO: 39315 - RNA, 21 nt, RNAi
uucaaccaccucuuguaacug

SEQ ID NO: 39316 - DNA, 21 bp, homo sapiens
cattgacaaggccaccactga

SEQ ID NO: 39317 - RNA, 21 nt, RNAi
uugacaaggccaccacugauu

SEQ ID NO: 39318 - RNA, 21 nt, RNAi
uuaacuguuccgguggugacu

SEQ ID NO: 39319 - DNA, 21 bp, homo sapiens
caacgaatgtctcatttgcca

SEQ ID NO: 39320 - RNA, 21 nt, RNAi
acgaaugucucauuugccauu

SEQ ID NO: 39321 - RNA, 21 nt, RNAi
uuugcuuacagaguaaacggu

SEQ ID NO: 39322 - DNA, 21 bp, homo sapiens
catttgccaccgagtcttaag

SEQ ID NO: 39323 - RNA, 21 nt, RNAi
uuugccaccgagucuuaaguu

SEQ ID NO: 39324 - RNA, 21 nt, RNAi
uuaaacgguggcucagaauuc

SEQ ID NO: 39325 - DNA, 21 bp, homo sapiens
caccgagtcttaagctgtcag

SEQ ID NO: 39326 - RNA, 21 nt, RNAi
ccgagucuuaagcugucaguu

SEQ ID NO: 39327 - RNA, 21 nt, RNAi
uuggcucagaauucgacaguc

SEQ ID NO: 39328 - DNA, 21 bp, homo sapiens
cagtgtaagatctgtggccga

SEQ ID NO: 39329 - RNA, 21 nt, RNAi
guguaagaucuguggccgauu

SEQ ID NO: 39330 - RNA, 21 nt, RNAi
uucacauucuagacaccggcu

SEQ ID NO: 39331 - DNA, 21 bp, homo sapiens
caaaggtaacctgaagacaca

SEQ ID NO: 39332 - RNA, 21 nt, RNAi
aagguaaccugaagacacauu

SEQ ID NO: 39333 - RNA, 21 nt, RNAi
uuuuccauuggacuucugugu

SEQ ID NO: 39334 - DNA, 21 bp, homo sapiens
caccgaaccaacacatccatt

SEQ ID NO: 39335 - RNA, 21 nt, RNAi
ccgaaccaacacauccauuuu

SEQ ID NO: 39336 - RNA, 21 nt, RNAi
uuggcuugguuguguagguaa

SEQ ID NO: 39337 - DNA, 21 bp, homo sapiens
caacacatccattaagacgca

SEQ ID NO: 39338 - RNA, 21 nt, RNAi
acacauccauuaagacgcauu

SEQ ID NO: 39339 - RNA, 21 nt, RNAi
uuuguguagguaauucugcgu

SEQ ID NO: 39340 - DNA, 21 bp, homo sapiens
cacatccattaagacgcagca

SEQ ID NO: 39341 - RNA, 21 nt, RNAi
cauccauuaagacgcagcauu

SEQ ID NO: 39342 - RNA, 21 nt, RNAi
uuguagguaauucugcgucgu

SEQ ID NO: 39343 - DNA, 21 bp, homo sapiens
catccattaagacgcagcatt

SEQ ID NO: 39344 - RNA, 21 nt, RNAi
uccauuaagacgcagcauuuu

SEQ ID NO: 39345 - RNA, 21 nt, RNAi
uuagguaauucugcgucguaa

SEQ ID NO: 39346 - DNA, 21 bp, homo sapiens
cattaagacgcagcattcgtg

SEQ ID NO: 39347 - RNA, 21 nt, RNAi
uuaagacgcagcauucguguu

SEQ ID NO: 39348 - RNA, 21 nt, RNAi
uuaauucugcgucguaagcac

SEQ ID NO: 39349 - DNA, 21 bp, homo sapiens
catctgccagaagaagttcac

SEQ ID NO: 39350 - RNA, 21 nt, RNAi
ucugccagaagaaguucacuu

SEQ ID NO: 39351 - RNA, 21 nt, RNAi
uuagacggucuucuucaagug

SEQ ID NO: 39352 - DNA, 21 bp, homo sapiens
cagaagaagttcactaatgcc

SEQ ID NO: 39353 - RNA, 21 nt, RNAi
gaagaaguucacuaaugccuu

SEQ ID NO: 39354 - RNA, 21 nt, RNAi
uucuucuucaagugauuacgg

SEQ ID NO: 39355 - DNA, 21 bp, homo sapiens
cactaatgccgtgatgctgca

SEQ ID NO: 39356 - RNA, 21 nt, RNAi
cuaaugccgugaugcugcauu

SEQ ID NO: 39357 - RNA, 21 nt, RNAi
uugauuacggcacuacgacgu

SEQ ID NO: 39358 - DNA, 21 bp, homo sapiens
cagcaacatattcggatgcac

SEQ ID NO: 39359 - RNA, 21 nt, RNAi
gcaacauauucggaugcacuu

SEQ ID NO: 39360 - RNA, 21 nt, RNAi
uucguuguauaagccuacgug

SEQ ID NO: 39361 - DNA, 21 bp, homo sapiens
caacatattcggatgcacatg

SEQ ID NO: 39362 - RNA, 21 nt, RNAi
acauauucggaugcacauguu

SEQ ID NO: 39363 - RNA, 21 nt, RNAi
uuuguauaagccuacguguac

SEQ ID NO: 39364 - DNA, 21 bp, homo sapiens
catgatgatgtcatcgaaagc

SEQ ID NO: 39365 - RNA, 21 nt, RNAi
ugaugaugucaucgaaagcuu

SEQ ID NO: 39366 - RNA, 21 nt, RNAi
uuacuacuacaguagcuuucg

SEQ ID NO: 39367 - DNA, 21 bp, homo sapiens
catcgaaagcatcgatgtaga

SEQ ID NO: 39368 - RNA, 21 nt, RNAi
ucgaaagcaucgauguagauu

SEQ ID NO: 39369 - RNA, 21 nt, RNAi
uuagcuuucguagcuacaucu

SEQ ID NO: 39370 - DNA, 21 bp, homo sapiens
catcgatgtagaggaagtcag

SEQ ID NO: 39371 - RNA, 21 nt, RNAi
ucgauguagaggaagucaguu

SEQ ID NO: 39372 - RNA, 21 nt, RNAi
uuagcuacaucuccuucaguc

SEQ ID NO: 39373 - DNA, 21 bp, homo sapiens
cagcatccactcggcatcacc

SEQ ID NO: 39374 - RNA, 21 nt, RNAi
gcauccacucggcaucaccuu

SEQ ID NO: 39375 - RNA, 21 nt, RNAi
uucguaggugagccguagugg

SEQ ID NO: 39376 - DNA, 21 bp, homo sapiens
catgatggcttccttagatgc

SEQ ID NO: 39377 - RNA, 21 nt, RNAi
ugauggcuuccuuagaugcuu

SEQ ID NO: 39378 - RNA, 21 nt, RNAi
uuacuaccgaaggaaucuacg

SEQ ID NO: 39379 - DNA, 21 bp, homo sapiens
caacgactcatcctcgctgat

SEQ ID NO: 39380 - RNA, 21 nt, RNAi
acgacucauccucgcugauuu

SEQ ID NO: 39381 - RNA, 21 nt, RNAi
uuugcugaguaggagcgacua

SEQ ID NO: 39382 - DNA, 21 bp, homo sapiens
caggagtatcagagccgaagc

SEQ ID NO: 39383 - RNA, 21 nt, RNAi
ggaguaucagagccgaagcuu

SEQ ID NO: 39384 - RNA, 21 nt, RNAi
uuccucauagucucggcuucg

SEQ ID NO: 39385 - DNA, 21 bp, homo sapiens
cagatatcctggaaaccacat

SEQ ID NO: 39386 - RNA, 21 nt, RNAi
gauauccuggaaaccacauuu

SEQ ID NO: 39387 - RNA, 21 nt, RNAi
uucuauaggaccuuuggugua

SEQ ID NO: 39388 - DNA, 21 bp, homo sapiens
cacatccttccaggcactctc

SEQ ID NO: 39389 - RNA, 21 nt, RNAi
cauccuuccaggcacucucuu

SEQ ID NO: 39390 - RNA, 21 nt, RNAi
uuguaggaagguccgugagag

SEQ ID NO: 39391 - DNA, 21 bp, homo sapiens
caatagtcaagccgaaagcat

SEQ ID NO: 39392 - RNA, 21 nt, RNAi
auagucaagccgaaagcauuu

SEQ ID NO: 39393 - RNA, 21 nt, RNAi
uuuaucaguucggcuuucgua

SEQ ID NO: 39394 - DNA, 21 bp, homo sapiens
caagccgaaagcatcaagtca

SEQ ID NO: 39395 - RNA, 21 nt, RNAi
agccgaaagcaucaagucauu

SEQ ID NO: 39396 - RNA, 21 nt, RNAi
uuucggcuuucguaguucagu

SEQ ID NO: 39397 - DNA, 21 bp, homo sapiens
caaagcagagagctccgagaa

SEQ ID NO: 39398 - RNA, 21 nt, RNAi
aagcagagagcuccgagaauu

SEQ ID NO: 39399 - RNA, 21 nt, RNAi
uuuucgucucucgaggcucuu

SEQ ID NO: 39400 - DNA, 21 bp, homo sapiens
cagagagctccgagaacagcc

SEQ ID NO: 39401 - RNA, 21 nt, RNAi
gagagcuccgagaacagccuu

SEQ ID NO: 39402 - RNA, 21 nt, RNAi
uucucucgaggcucuugucgg

SEQ ID NO: 39403 - DNA, 21 bp, homo sapiens
cagccgcactgagatggaagg

SEQ ID NO: 39404 - RNA, 21 nt, RNAi
gccgcacugagauggaagguu

SEQ ID NO: 39405 - RNA, 21 nt, RNAi
uucggcgugacucuaccuucc

SEQ ID NO: 39406 - DNA, 21 bp, homo sapiens
cactgagatggaaggtcggag

SEQ ID NO: 39407 - RNA, 21 nt, RNAi
cugagauggaaggucggaguu

SEQ ID NO: 39408 - RNA, 21 nt, RNAi
uugacucuaccuuccagccuc

SEQ ID NO: 39409 - DNA, 21 bp, homo sapiens
caaggttgaagttcctggcac

SEQ ID NO: 39410 - RNA, 21 nt, RNAi
agguugaaguuccuggcacuu

SEQ ID NO: 39411 - RNA, 21 nt, RNAi
uuuccaacuucaaggaccgug

SEQ ID NO: 39412 - DNA, 21 bp, homo sapiens
caggccaagcaacatggctgc

SEQ ID NO: 39413 - RNA, 21 nt, RNAi
ggccaagcaacauggcugcuu

SEQ ID NO: 39414 - RNA, 21 nt, RNAi
uuccgguucguuguaccgacg

SEQ ID NO: 39415 - DNA, 21 bp, homo sapiens
caagcaacatggctgcacacg

SEQ ID NO: 39416 - RNA, 21 nt, RNAi
agcaacauggcugcacacguu

SEQ ID NO: 39417 - RNA, 21 nt, RNAi
uuucguuguaccgacgugugc

SEQ ID NO: 39418 - DNA, 21 bp, homo sapiens
caacatggctgcacacggtgt

SEQ ID NO: 39419 - RNA, 21 nt, RNAi
acauggcugcacacgguguuu

SEQ ID NO: 39420 - RNA, 21 nt, RNAi
uuuguaccgacgugugccaca

SEQ ID NO: 39421 - DNA, 21 bp, homo sapiens
cagatccacgagcggactcac

SEQ ID NO: 39422 - RNA, 21 nt, RNAi
gauccacgagcggacucacuu

SEQ ID NO: 39423 - RNA, 21 nt, RNAi
uucuaggugcucgccugagug

SEQ ID NO: 39424 - DNA, 21 bp, homo sapiens
cacgagcggactcacactgga

SEQ ID NO: 39425 - RNA, 21 nt, RNAi
cgagcggacucacacuggauu

SEQ ID NO: 39426 - RNA, 21 nt, RNAi
uugcucgccugagugugaccu

SEQ ID NO: 39427 - DNA, 21 bp, homo sapiens
caccaaaggcaacttaaaggt

SEQ ID NO: 39428 - RNA, 21 nt, RNAi
ccaaaggcaacuuaaagguuu

SEQ ID NO: 39429 - RNA, 21 nt, RNAi
uugguuuccguugaauuucca

SEQ ID NO: 39430 - DNA, 21 bp, homo sapiens
caaaggcaacttaaaggttca

SEQ ID NO: 39431 - RNA, 21 nt, RNAi
aaggcaacuuaaagguucauu

SEQ ID NO: 39432 - RNA, 21 nt, RNAi
uuuuccguugaauuuccaagu

SEQ ID NO: 39433 - DNA, 21 bp, homo sapiens
caacttaaaggttcactacat

SEQ ID NO: 39434 - RNA, 21 nt, RNAi
acuuaaagguucacuacauuu

SEQ ID NO: 39435 - RNA, 21 nt, RNAi
uuugaauuuccaagugaugua

SEQ ID NO: 39436 - DNA, 21 bp, homo sapiens
catcgagaacaccatggctct

SEQ ID NO: 39437 - RNA, 21 nt, RNAi
ucgagaacaccauggcucuuu

SEQ ID NO: 39438 - RNA, 21 nt, RNAi
uuagcucuugugguaccgaga

SEQ ID NO: 39439 - DNA, 21 bp, homo sapiens
caccatggctctgttaggtac

SEQ ID NO: 39440 - RNA, 21 nt, RNAi
ccauggcucuguuagguacuu

SEQ ID NO: 39441 - RNA, 21 nt, RNAi
uugguaccgagacaauccaug

SEQ ID NO: 39442 - DNA, 21 bp, homo sapiens
catggctctgttaggtacgga

SEQ ID NO: 39443 - RNA, 21 nt, RNAi
uggcucuguuagguacggauu

SEQ ID NO: 39444 - RNA, 21 nt, RNAi
uuaccgagacaauccaugccu

SEQ ID NO: 39445 - DNA, 21 bp, homo sapiens
cagtacaccagcatgctcaat

SEQ ID NO: 39446 - RNA, 21 nt, RNAi
guacaccagcaugcucaauuu

SEQ ID NO: 39447 - RNA, 21 nt, RNAi
uucauguggucguacgaguua

SEQ ID NO: 39448 - DNA, 21 bp, homo sapiens
caccagcatgctcaatggcgg

SEQ ID NO: 39449 - RNA, 21 nt, RNAi
ccagcaugcucaauggcgguu

SEQ ID NO: 39450 - RNA, 21 nt, RNAi
uuggucguacgaguuaccgcc

SEQ ID NO: 39451 - DNA, 21 bp, homo sapiens
cagcatgctcaatggcggtct

SEQ ID NO: 39452 - RNA, 21 nt, RNAi
gcaugcucaauggcggucuuu

SEQ ID NO: 39453 - RNA, 21 nt, RNAi
uucguacgaguuaccgccaga

SEQ ID NO: 39454 - DNA, 21 bp, homo sapiens
catgctcaatggcggtctggc

SEQ ID NO: 39455 - RNA, 21 nt, RNAi
ugcucaauggcggucuggcuu

SEQ ID NO: 39456 - RNA, 21 nt, RNAi
uuacgaguuaccgccagaccg

SEQ ID NO: 39457 - DNA, 21 bp, homo sapiens
caatggcggtctggccgtgaa

SEQ ID NO: 39458 - RNA, 21 nt, RNAi
auggcggucuggccgugaauu

SEQ ID NO: 39459 - RNA, 21 nt, RNAi
uuuaccgccagaccggcacuu

SEQ ID NO: 39460 - DNA, 21 bp, homo sapiens
caatgagatctctgtgatcca

SEQ ID NO: 39461 - RNA, 21 nt, RNAi
augagaucucugugauccauu

SEQ ID NO: 39462 - RNA, 21 nt, RNAi
uuuacucuagagacacuaggu

SEQ ID NO: 39463 - DNA, 21 bp, homo sapiens
cacctccgttgtgaataacgc

SEQ ID NO: 39464 - RNA, 21 nt, RNAi
ccuccguugugaauaacgcuu

SEQ ID NO: 39465 - RNA, 21 nt, RNAi
uuggaggcaacacuuauugcg

SEQ ID NO: 39466 - DNA, 21 bp, homo sapiens
cactgtctccaagatggatgg

SEQ ID NO: 39467 - RNA, 21 nt, RNAi
cugucuccaagauggaugguu

SEQ ID NO: 39468 - RNA, 21 nt, RNAi
uugacagagguucuaccuacc

SEQ ID NO: 39469 - DNA, 21 bp, homo sapiens
caagtgctactgacggcgttc

SEQ ID NO: 39470 - RNA, 21 nt, RNAi
agugcuacugacggcguucuu

SEQ ID NO: 39471 - RNA, 21 nt, RNAi
uuucacgaugacugccgcaag

SEQ ID NO: 39472 - DNA, 21 bp, homo sapiens
caaacaccagtttcctcactt

SEQ ID NO: 39473 - RNA, 21 nt, RNAi
aacaccaguuuccucacuuuu

SEQ ID NO: 39474 - RNA, 21 nt, RNAi
uuuuguggucaaaggagugaa

SEQ ID NO: 39475 - DNA, 21 bp, homo sapiens
caccagtttcctcacttcctg

SEQ ID NO: 39476 - RNA, 21 nt, RNAi
ccaguuuccucacuuccuguu

SEQ ID NO: 39477 - RNA, 21 nt, RNAi
uuggucaaaggagugaaggac

SEQ ID NO: 39478 - DNA, 21 bp, homo sapiens
cagtttcctcacttcctggaa

SEQ ID NO: 39479 - RNA, 21 nt, RNAi
guuuccucacuuccuggaauu

SEQ ID NO: 39480 - RNA, 21 nt, RNAi
uucaaaggagugaaggaccuu

SEQ ID NO: 39481 - DNA, 21 bp, homo sapiens
gaatgacgaggtggcgagtga

SEQ ID NO: 39482 - RNA, 21 nt, RNAi
augacgagguggcgagugauu

SEQ ID NO: 39483 - RNA, 21 nt, RNAi
uuuacugcuccaccgcucacu

SEQ ID NO: 39484 - DNA, 21 bp, homo sapiens
gacgaggtggcgagtgaggat

SEQ ID NO: 39485 - RNA, 21 nt, RNAi
cgagguggcgagugaggauuu

SEQ ID NO: 39486 - RNA, 21 nt, RNAi
uugcuccaccgcucacuccua

SEQ ID NO: 39487 - DNA, 21 bp, homo sapiens
gaggtggcgagtgaggatgaa

SEQ ID NO: 39488 - RNA, 21 nt, RNAi
gguggcgagugaggaugaauu

SEQ ID NO: 39489 - RNA, 21 nt, RNAi
uuccaccgcucacuccuacuu

SEQ ID NO: 39490 - DNA, 21 bp, homo sapiens
gagtgaggatgaagccacagt

SEQ ID NO: 39491 - RNA, 21 nt, RNAi
gugaggaugaagccacaguuu

SEQ ID NO: 39492 - RNA, 21 nt, RNAi
uucacuccuacuucgguguca

SEQ ID NO: 39493 - DNA, 21 bp, homo sapiens
gaggatgaagccacagtaaag

SEQ ID NO: 39494 - RNA, 21 nt, RNAi
ggaugaagccacaguaaaguu

SEQ ID NO: 39495 - RNA, 21 nt, RNAi
uuccuacuucggugucauuuc

SEQ ID NO: 39496 - DNA, 21 bp, homo sapiens
gatgaagccacagtaaagcgg

SEQ ID NO: 39497 - RNA, 21 nt, RNAi
ugaagccacaguaaagcgguu

SEQ ID NO: 39498 - RNA, 21 nt, RNAi
uuacuucggugucauuucgcc

SEQ ID NO: 39499 - DNA, 21 bp, homo sapiens
gaagccacagtaaagcggctt

SEQ ID NO: 39500 - RNA, 21 nt, RNAi
agccacaguaaagcggcuuuu

SEQ ID NO: 39501 - RNA, 21 nt, RNAi
uuucggugucauuucgccgaa

SEQ ID NO: 39502 - DNA, 21 bp, homo sapiens
gaggagacgcacgtctgtgag

SEQ ID NO: 39503 - RNA, 21 nt, RNAi
ggagacgcacgucugugaguu

SEQ ID NO: 39504 - RNA, 21 nt, RNAi
uuccucugcgugcagacacuc

SEQ ID NO: 39505 - DNA, 21 bp, homo sapiens
gagacgcacgtctgtgagaaa

SEQ ID NO: 39506 - RNA, 21 nt, RNAi
gacgcacgucugugagaaauu

SEQ ID NO: 39507 - RNA, 21 nt, RNAi
uucugcgugcagacacucuuu

SEQ ID NO: 39508 - DNA, 21 bp, homo sapiens
gacgcacgtctgtgagaaatg

SEQ ID NO: 39509 - RNA, 21 nt, RNAi
cgcacgucugugagaaauguu

SEQ ID NO: 39510 - RNA, 21 nt, RNAi
uugcgugcagacacucuuuac

SEQ ID NO: 39511 - DNA, 21 bp, homo sapiens
gagaaatgctgtgcggagttc

SEQ ID NO: 39512 - RNA, 21 nt, RNAi
gaaaugcugugcggaguucuu

SEQ ID NO: 39513 - RNA, 21 nt, RNAi
uucuuuacgacacgccucaag

SEQ ID NO: 39514 - DNA, 21 bp, homo sapiens
gaaatgctgtgcggagttctt

SEQ ID NO: 39515 - RNA, 21 nt, RNAi
aaugcugugcggaguucuuuu

SEQ ID NO: 39516 - RNA, 21 nt, RNAi
uuuuacgacacgccucaagaa

SEQ ID NO: 39517 - DNA, 21 bp, homo sapiens
gagttcttcagcatctctgag

SEQ ID NO: 39518 - RNA, 21 nt, RNAi
guucuucagcaucucugaguu

SEQ ID NO: 39519 - RNA, 21 nt, RNAi
uucaagaagucguagagacuc

SEQ ID NO: 39520 - DNA, 21 bp, homo sapiens
gagttcctggaacataagaaa

SEQ ID NO: 39521 - RNA, 21 nt, RNAi
guuccuggaacauaagaaauu

SEQ ID NO: 39522 - RNA, 21 nt, RNAi
uucaaggaccuuguauucuuu

SEQ ID NO: 39523 - DNA, 21 bp, homo sapiens
gaagacttctccggagctgta

SEQ ID NO: 39524 - RNA, 21 nt, RNAi
agacuucuccggagcuguauu

SEQ ID NO: 39525 - RNA, 21 nt, RNAi
uuucugaagaggccucgacau

SEQ ID NO: 39526 - DNA, 21 bp, homo sapiens
gacttctccggagctgtactg

SEQ ID NO: 39527 - RNA, 21 nt, RNAi
cuucuccggagcuguacuguu

SEQ ID NO: 39528 - RNA, 21 nt, RNAi
uugaagaggccucgacaugac

SEQ ID NO: 39529 - DNA, 21 bp, homo sapiens
gagctgtactgagccaccagc

SEQ ID NO: 39530 - RNA, 21 nt, RNAi
gcuguacugagccaccagcuu

SEQ ID NO: 39531 - RNA, 21 nt, RNAi
uucgacaugacucgguggucg

SEQ ID NO: 39532 - DNA, 21 bp, homo sapiens
gagaatggcggcagctcagag

SEQ ID NO: 39533 - RNA, 21 nt, RNAi
gaauggcggcagcucagaguu

SEQ ID NO: 39534 - RNA, 21 nt, RNAi
uucuuaccgccgucgagucuc

SEQ ID NO: 39535 - DNA, 21 bp, homo sapiens
gaatggcggcagctcagagga

SEQ ID NO: 39536 - RNA, 21 nt, RNAi
auggcggcagcucagaggauu

SEQ ID NO: 39537 - RNA, 21 nt, RNAi
uuuaccgccgucgagucuccu

SEQ ID NO: 39538 - DNA, 21 bp, homo sapiens
gaggacatgaaggagaagccg

SEQ ID NO: 39539 - RNA, 21 nt, RNAi
ggacaugaaggagaagccguu

SEQ ID NO: 39540 - RNA, 21 nt, RNAi
uuccuguacuuccucuucggc

SEQ ID NO: 39541 - DNA, 21 bp, homo sapiens
gacatgaaggagaagccggat

SEQ ID NO: 39542 - RNA, 21 nt, RNAi
caugaaggagaagccggauuu

SEQ ID NO: 39543 - RNA, 21 nt, RNAi
uuguacuuccucuucggccua

SEQ ID NO: 39544 - DNA, 21 bp, homo sapiens
gaaggagaagccggatgcgga

SEQ ID NO: 39545 - RNA, 21 nt, RNAi
aggagaagccggaugcggauu

SEQ ID NO: 39546 - RNA, 21 nt, RNAi
uuuccucuucggccuacgccu

SEQ ID NO: 39547 - DNA, 21 bp, homo sapiens
gagaagccggatgcggagtct

SEQ ID NO: 39548 - RNA, 21 nt, RNAi
gaagccggaugcggagucuuu

SEQ ID NO: 39549 - RNA, 21 nt, RNAi
uucuucggccuacgccucaga

SEQ ID NO: 39550 - DNA, 21 bp, homo sapiens
gaagccggatgcggagtctgt

SEQ ID NO: 39551 - RNA, 21 nt, RNAi
agccggaugcggagucuguuu

SEQ ID NO: 39552 - RNA, 21 nt, RNAi
uuucggccuacgccucagaca

SEQ ID NO: 39553 - DNA, 21 bp, homo sapiens
gatgcggagtctgtggtgtac

SEQ ID NO: 39554 - RNA, 21 nt, RNAi
ugcggagucugugguguacuu

SEQ ID NO: 39555 - RNA, 21 nt, RNAi
uuacgccucagacaccacaug

SEQ ID NO: 39556 - DNA, 21 bp, homo sapiens
gagtctgtggtgtacctaaag

SEQ ID NO: 39557 - RNA, 21 nt, RNAi
gucugugguguaccuaaaguu

SEQ ID NO: 39558 - RNA, 21 nt, RNAi
uucagacaccacauggauuuc

SEQ ID NO: 39559 - DNA, 21 bp, homo sapiens
gacataagctatttagccaaa

SEQ ID NO: 39560 - RNA, 21 nt, RNAi
cauaagcuauuuagccaaauu

SEQ ID NO: 39561 - RNA, 21 nt, RNAi
uuguauucgauaaaucgguuu

SEQ ID NO: 39562 - DNA, 21 bp, homo sapiens
gagcagatcttgtgtctgcag

SEQ ID NO: 39563 - RNA, 21 nt, RNAi
gcagaucuugugucugcaguu

SEQ ID NO: 39564 - RNA, 21 nt, RNAi
uucgucuagaacacagacguc

SEQ ID NO: 39565 - DNA, 21 bp, homo sapiens
gatcttgtgtctgcagcagca

SEQ ID NO: 39566 - RNA, 21 nt, RNAi
ucuugugucugcagcagcauu

SEQ ID NO: 39567 - RNA, 21 nt, RNAi
uuagaacacagacgucgucgu

SEQ ID NO: 39568 - DNA, 21 bp, homo sapiens
gatccagctcaccgagcagat

SEQ ID NO: 39569 - RNA, 21 nt, RNAi
uccagcucaccgagcagauuu

SEQ ID NO: 39570 - RNA, 21 nt, RNAi
uuaggucgaguggcucgucua

SEQ ID NO: 39571 - DNA, 21 bp, homo sapiens
gagcagatccgcatccaggtg

SEQ ID NO: 39572 - RNA, 21 nt, RNAi
gcagauccgcauccagguguu

SEQ ID NO: 39573 - RNA, 21 nt, RNAi
uucgucuaggcguagguccac

SEQ ID NO: 39574 - DNA, 21 bp, homo sapiens
gatccgcatccaggtgaacat

SEQ ID NO: 39575 - RNA, 21 nt, RNAi
uccgcauccaggugaacauuu

SEQ ID NO: 39576 - RNA, 21 nt, RNAi
uuaggcguagguccacuugua

SEQ ID NO: 39577 - DNA, 21 bp, homo sapiens
gaaagctggaagccaaggtct

SEQ ID NO: 39578 - RNA, 21 nt, RNAi
aagcuggaagccaaggucuuu

SEQ ID NO: 39579 - RNA, 21 nt, RNAi
uuuucgaccuucgguuccaga

SEQ ID NO: 39580 - DNA, 21 bp, homo sapiens
gaagccaaggtctgtctctgg

SEQ ID NO: 39581 - RNA, 21 nt, RNAi
agccaaggucugucucugguu

SEQ ID NO: 39582 - RNA, 21 nt, RNAi
uuucgguuccagacagagacc

SEQ ID NO: 39583 - DNA, 21 bp, homo sapiens
gatgccttgaaacaagccaag

SEQ ID NO: 39584 - RNA, 21 nt, RNAi
ugccuugaaacaagccaaguu

SEQ ID NO: 39585 - RNA, 21 nt, RNAi
uuacggaacuuuguucgguuc

SEQ ID NO: 39586 - DNA, 21 bp, homo sapiens
gaaacaagccaagctacctca

SEQ ID NO: 39587 - RNA, 21 nt, RNAi
aacaagccaagcuaccucauu

SEQ ID NO: 39588 - RNA, 21 nt, RNAi
uuuuguucgguucgauggagu

SEQ ID NO: 39589 - DNA, 21 bp, homo sapiens
gagcgctttgcttcctcaggc

SEQ ID NO: 39590 - RNA, 21 nt, RNAi
gcgcuuugcuuccucaggcuu

SEQ ID NO: 39591 - RNA, 21 nt, RNAi
uucgcgaaacgaaggaguccg

SEQ ID NO: 39592 - DNA, 21 bp, homo sapiens
gaagccaccgaacatctccgc

SEQ ID NO: 39593 - RNA, 21 nt, RNAi
agccaccgaacaucuccgcuu

SEQ ID NO: 39594 - RNA, 21 nt, RNAi
uuucgguggcuuguagaggcg

SEQ ID NO: 39595 - DNA, 21 bp, homo sapiens
gaacatctccgcggtggatgt

SEQ ID NO: 39596 - RNA, 21 nt, RNAi
acaucuccgcgguggauguuu

SEQ ID NO: 39597 - RNA, 21 nt, RNAi
uuuguagaggcgccaccuaca

SEQ ID NO: 39598 - DNA, 21 bp, homo sapiens
gactgatagctccttgcagat

SEQ ID NO: 39599 - RNA, 21 nt, RNAi
cugauagcuccuugcagauuu

SEQ ID NO: 39600 - RNA, 21 nt, RNAi
uugacuaucgaggaacgucua

SEQ ID NO: 39601 - DNA, 21 bp, homo sapiens
gatagctccttgcagatccac

SEQ ID NO: 39602 - RNA, 21 nt, RNAi
uagcuccuugcagauccacuu

SEQ ID NO: 39603 - RNA, 21 nt, RNAi
uuaucgaggaacgucuaggug

SEQ ID NO: 39604 - DNA, 21 bp, homo sapiens
gagttccaggacaaagtggcg

SEQ ID NO: 39605 - RNA, 21 nt, RNAi
guuccaggacaaaguggcguu

SEQ ID NO: 39606 - RNA, 21 nt, RNAi
uucaagguccuguuucaccgc

SEQ ID NO: 39607 - DNA, 21 bp, homo sapiens
gatgaaccgagtctttcttta

SEQ ID NO: 39608 - RNA, 21 nt, RNAi
ugaaccgagucuuucuuuauu

SEQ ID NO: 39609 - RNA, 21 nt, RNAi
uuacuuggcucagaaagaaau

SEQ ID NO: 39610 - DNA, 21 bp, homo sapiens
gaaccgagtctttctttagac

SEQ ID NO: 39611 - RNA, 21 nt, RNAi
accgagucuuucuuuagacuu

SEQ ID NO: 39612 - RNA, 21 nt, RNAi
uuuggcucagaaagaaaucug

SEQ ID NO: 39613 - DNA, 21 bp, homo sapiens
gagtctttctttagacagcaa

SEQ ID NO: 39614 - RNA, 21 nt, RNAi
gucuuucuuuagacagcaauu

SEQ ID NO: 39615 - RNA, 21 nt, RNAi
uucagaaagaaaucugucguu

SEQ ID NO: 39616 - DNA, 21 bp, homo sapiens
gacagcaaacctgtccttgta

SEQ ID NO: 39617 - RNA, 21 nt, RNAi
cagcaaaccuguccuuguauu

SEQ ID NO: 39618 - RNA, 21 nt, RNAi
uugucguuuggacaggaacau

SEQ ID NO: 39619 - DNA, 21 bp, homo sapiens
gaaattgcagcagttggtgga

SEQ ID NO: 39620 - RNA, 21 nt, RNAi
aauugcagcaguugguggauu

SEQ ID NO: 39621 - RNA, 21 nt, RNAi
uuuuaacgucgucaaccaccu

SEQ ID NO: 39622 - DNA, 21 bp, homo sapiens
gagaacattgacaaggccacc

SEQ ID NO: 39623 - RNA, 21 nt, RNAi
gaacauugacaaggccaccuu

SEQ ID NO: 39624 - RNA, 21 nt, RNAi
uucuuguaacuguuccggugg

SEQ ID NO: 39625 - DNA, 21 bp, homo sapiens
gaacattgacaaggccaccac

SEQ ID NO: 39626 - RNA, 21 nt, RNAi
acauugacaaggccaccacuu

SEQ ID NO: 39627 - RNA, 21 nt, RNAi
uuuguaacuguuccgguggug

SEQ ID NO: 39628 - DNA, 21 bp, homo sapiens
gaatgtctcatttgccaccga

SEQ ID NO: 39629 - RNA, 21 nt, RNAi
augucucauuugccaccgauu

SEQ ID NO: 39630 - RNA, 21 nt, RNAi
uuuacagaguaaacgguggcu

SEQ ID NO: 39631 - DNA, 21 bp, homo sapiens
gagtcttaagctgtcagagct

SEQ ID NO: 39632 - RNA, 21 nt, RNAi
gucuuaagcugucagagcuuu

SEQ ID NO: 39633 - RNA, 21 nt, RNAi
uucagaauucgacagucucga

SEQ ID NO: 39634 - DNA, 21 bp, homo sapiens
gagagaccgttccagtgtaag

SEQ ID NO: 39635 - RNA, 21 nt, RNAi
gagaccguuccaguguaaguu

SEQ ID NO: 39636 - RNA, 21 nt, RNAi
uucucuggcaaggucacauuc

SEQ ID NO: 39637 - DNA, 21 bp, homo sapiens
gagaccgttccagtgtaagat

SEQ ID NO: 39638 - RNA, 21 nt, RNAi
gaccguuccaguguaagauuu

SEQ ID NO: 39639 - RNA, 21 nt, RNAi
uucuggcaaggucacauucua

SEQ ID NO: 39640 - DNA, 21 bp, homo sapiens
gaccgttccagtgtaagatct

SEQ ID NO: 39641 - RNA, 21 nt, RNAi
ccguuccaguguaagaucuuu

SEQ ID NO: 39642 - RNA, 21 nt, RNAi
uuggcaaggucacauucuaga

SEQ ID NO: 39643 - DNA, 21 bp, homo sapiens
gaaccaacacatccattaaga

SEQ ID NO: 39644 - RNA, 21 nt, RNAi
accaacacauccauuaagauu

SEQ ID NO: 39645 - RNA, 21 nt, RNAi
uuugguuguguagguaauucu

SEQ ID NO: 39646 - DNA, 21 bp, homo sapiens
gaagaagttcactaatgccgt

SEQ ID NO: 39647 - RNA, 21 nt, RNAi
agaaguucacuaaugccguuu

SEQ ID NO: 39648 - RNA, 21 nt, RNAi
uuucuucaagugauuacggca

SEQ ID NO: 39649 - DNA, 21 bp, homo sapiens
gaagttcactaatgccgtgat

SEQ ID NO: 39650 - RNA, 21 nt, RNAi
aguucacuaaugccgugauuu

SEQ ID NO: 39651 - RNA, 21 nt, RNAi
uuucaagugauuacggcacua

SEQ ID NO: 39652 - DNA, 21 bp, homo sapiens
gatgctgcagcaacatattcg

SEQ ID NO: 39653 - RNA, 21 nt, RNAi
ugcugcagcaacauauucguu

SEQ ID NO: 39654 - RNA, 21 nt, RNAi
uuacgacgucguuguauaagc

SEQ ID NO: 39655 - DNA, 21 bp, homo sapiens
gatgatgtcatcgaaagcatc

SEQ ID NO: 39656 - RNA, 21 nt, RNAi
ugaugucaucgaaagcaucuu

SEQ ID NO: 39657 - RNA, 21 nt, RNAi
uuacuacaguagcuuucguag

SEQ ID NO: 39658 - DNA, 21 bp, homo sapiens
gatgtcatcgaaagcatcgat

SEQ ID NO: 39659 - RNA, 21 nt, RNAi
ugucaucgaaagcaucgauuu

SEQ ID NO: 39660 - RNA, 21 nt, RNAi
uuacaguagcuuucguagcua

SEQ ID NO: 39661 - DNA, 21 bp, homo sapiens
gaaagcatcgatgtagaggaa

SEQ ID NO: 39662 - RNA, 21 nt, RNAi
aagcaucgauguagaggaauu

SEQ ID NO: 39663 - RNA, 21 nt, RNAi
uuuucguagcuacaucuccuu

SEQ ID NO: 39664 - DNA, 21 bp, homo sapiens
gatgtagaggaagtcagctcc

SEQ ID NO: 39665 - RNA, 21 nt, RNAi
uguagaggaagucagcuccuu

SEQ ID NO: 39666 - RNA, 21 nt, RNAi
uuacaucuccuucagucgagg

SEQ ID NO: 39667 - DNA, 21 bp, homo sapiens
gagagcgatggcttgaccaac

SEQ ID NO: 39668 - RNA, 21 nt, RNAi
gagcgauggcuugaccaacuu

SEQ ID NO: 39669 - RNA, 21 nt, RNAi
uucucgcuaccgaacugguug

SEQ ID NO: 39670 - DNA, 21 bp, homo sapiens
gagcgatggcttgaccaacga

SEQ ID NO: 39671 - RNA, 21 nt, RNAi
gcgauggcuugaccaacgauu

SEQ ID NO: 39672 - RNA, 21 nt, RNAi
uucgcuaccgaacugguugcu

SEQ ID NO: 39673 - DNA, 21 bp, homo sapiens
gatggcttgaccaacgactca

SEQ ID NO: 39674 - RNA, 21 nt, RNAi
uggcuugaccaacgacucauu

SEQ ID NO: 39675 - RNA, 21 nt, RNAi
uuaccgaacugguugcugagu

SEQ ID NO: 39676 - DNA, 21 bp, homo sapiens
gaccaacgactcatcctcgct

SEQ ID NO: 39677 - RNA, 21 nt, RNAi
ccaacgacucauccucgcuuu

SEQ ID NO: 39678 - RNA, 21 nt, RNAi
uugguugcugaguaggagcga

SEQ ID NO: 39679 - DNA, 21 bp, homo sapiens
gagaccaggagtatcagagcc

SEQ ID NO: 39680 - RNA, 21 nt, RNAi
gaccaggaguaucagagccuu

SEQ ID NO: 39681 - RNA, 21 nt, RNAi
uucugguccucauagucucgg

SEQ ID NO: 39682 - DNA, 21 bp, homo sapiens
gaccaggagtatcagagccga

SEQ ID NO: 39683 - RNA, 21 nt, RNAi
ccaggaguaucagagccgauu

SEQ ID NO: 39684 - RNA, 21 nt, RNAi
uugguccucauagucucggcu

SEQ ID NO: 39685 - DNA, 21 bp, homo sapiens
gatatcctggaaaccacatcc

SEQ ID NO: 39686 - RNA, 21 nt, RNAi
uauccuggaaaccacauccuu

SEQ ID NO: 39687 - RNA, 21 nt, RNAi
uuauaggaccuuugguguagg

SEQ ID NO: 39688 - DNA, 21 bp, homo sapiens
gaaaccacatccttccaggca

SEQ ID NO: 39689 - RNA, 21 nt, RNAi
aaccacauccuuccaggcauu

SEQ ID NO: 39690 - RNA, 21 nt, RNAi
uuuugguguaggaagguccgu

SEQ ID NO: 39691 - DNA, 21 bp, homo sapiens
gaaagcatcaagtcaaagtct

SEQ ID NO: 39692 - RNA, 21 nt, RNAi
aagcaucaagucaaagucuuu

SEQ ID NO: 39693 - RNA, 21 nt, RNAi
uuuucguaguucaguuucaga

SEQ ID NO: 39694 - DNA, 21 bp, homo sapiens
gagcaaagcagagagctccga

SEQ ID NO: 39695 - RNA, 21 nt, RNAi
gcaaagcagagagcuccgauu

SEQ ID NO: 39696 - RNA, 21 nt, RNAi
uucguuucgucucucgaggcu

SEQ ID NO: 39697 - DNA, 21 bp, homo sapiens
gagaacagccgcactgagatg

SEQ ID NO: 39698 - RNA, 21 nt, RNAi
gaacagccgcacugagauguu

SEQ ID NO: 39699 - RNA, 21 nt, RNAi
uucuugucggcgugacucuac

SEQ ID NO: 39700 - DNA, 21 bp, homo sapiens
gaacagccgcactgagatgga

SEQ ID NO: 39701 - RNA, 21 nt, RNAi
acagccgcacugagauggauu

SEQ ID NO: 39702 - RNA, 21 nt, RNAi
uuugucggcgugacucuaccu

SEQ ID NO: 39703 - DNA, 21 bp, homo sapiens
gagatggaaggtcggagcagt

SEQ ID NO: 39704 - RNA, 21 nt, RNAi
gauggaaggucggagcaguuu

SEQ ID NO: 39705 - RNA, 21 nt, RNAi
uucuaccuuccagccucguca

SEQ ID NO: 39706 - DNA, 21 bp, homo sapiens
gatggaaggtcggagcagtct

SEQ ID NO: 39707 - RNA, 21 nt, RNAi
uggaaggucggagcagucuuu

SEQ ID NO: 39708 - RNA, 21 nt, RNAi
uuaccuuccagccucgucaga

SEQ ID NO: 39709 - DNA, 21 bp, homo sapiens
gacctatgtcaaggttgaagt

SEQ ID NO: 39710 - RNA, 21 nt, RNAi
ccuaugucaagguugaaguuu

SEQ ID NO: 39711 - RNA, 21 nt, RNAi
uuggauacaguuccaacuuca

SEQ ID NO: 39712 - DNA, 21 bp, homo sapiens
gaagttcctggcacatttgtg

SEQ ID NO: 39713 - RNA, 21 nt, RNAi
aguuccuggcacauuuguguu

SEQ ID NO: 39714 - RNA, 21 nt, RNAi
uuucaaggaccguguaaacac

SEQ ID NO: 39715 - DNA, 21 bp, homo sapiens
gacaggccaagcaacatggct

SEQ ID NO: 39716 - RNA, 21 nt, RNAi
caggccaagcaacauggcuuu

SEQ ID NO: 39717 - RNA, 21 nt, RNAi
uuguccgguucguuguaccga

SEQ ID NO: 39718 - DNA, 21 bp, homo sapiens
gaagaacttctcgtctgctag

SEQ ID NO: 39719 - RNA, 21 nt, RNAi
agaacuucucgucugcuaguu

SEQ ID NO: 39720 - RNA, 21 nt, RNAi
uuucuugaagagcagacgauc

SEQ ID NO: 39721 - DNA, 21 bp, homo sapiens
gaacttctcgtctgctagcgc

SEQ ID NO: 39722 - RNA, 21 nt, RNAi
acuucucgucugcuagcgcuu

SEQ ID NO: 39723 - RNA, 21 nt, RNAi
uuugaagagcagacgaucgcg

SEQ ID NO: 39724 - DNA, 21 bp, homo sapiens
gatccacgagcggactcacac

SEQ ID NO: 39725 - RNA, 21 nt, RNAi
uccacgagcggacucacacuu

SEQ ID NO: 39726 - RNA, 21 nt, RNAi
uuaggugcucgccugagugug

SEQ ID NO: 39727 - DNA, 21 bp, homo sapiens
gagcggactcacactggagag

SEQ ID NO: 39728 - RNA, 21 nt, RNAi
gcggacucacacuggagaguu

SEQ ID NO: 39729 - RNA, 21 nt, RNAi
uucgccugagugugaccucuc

SEQ ID NO: 39730 - DNA, 21 bp, homo sapiens
gactcacactggagagaagcc

SEQ ID NO: 39731 - RNA, 21 nt, RNAi
cucacacuggagagaagccuu

SEQ ID NO: 39732 - RNA, 21 nt, RNAi
uugagugugaccucucuucgg

SEQ ID NO: 39733 - DNA, 21 bp, homo sapiens
gaaggaagttggccatcgaga

SEQ ID NO: 39734 - RNA, 21 nt, RNAi
aggaaguuggccaucgagauu

SEQ ID NO: 39735 - RNA, 21 nt, RNAi
uuuccuucaaccgguagcucu

SEQ ID NO: 39736 - DNA, 21 bp, homo sapiens
gaagttggccatcgagaacac

SEQ ID NO: 39737 - RNA, 21 nt, RNAi
aguuggccaucgagaacacuu

SEQ ID NO: 39738 - RNA, 21 nt, RNAi
uuucaaccgguagcucuugug

SEQ ID NO: 39739 - DNA, 21 bp, homo sapiens
gagaacaccatggctctgtta

SEQ ID NO: 39740 - RNA, 21 nt, RNAi
gaacaccauggcucuguuauu

SEQ ID NO: 39741 - RNA, 21 nt, RNAi
uucuugugguaccgagacaau

SEQ ID NO: 39742 - DNA, 21 bp, homo sapiens
gaacaccatggctctgttagg

SEQ ID NO: 39743 - RNA, 21 nt, RNAi
acaccauggcucuguuagguu

SEQ ID NO: 39744 - RNA, 21 nt, RNAi
uuugugguaccgagacaaucc

SEQ ID NO: 39745 - DNA, 21 bp, homo sapiens
gaaccagtacaccagcatgct

SEQ ID NO: 39746 - RNA, 21 nt, RNAi
accaguacaccagcaugcuuu

SEQ ID NO: 39747 - RNA, 21 nt, RNAi
uuuggucauguggucguacga

SEQ ID NO: 39748 - DNA, 21 bp, homo sapiens
gaagaccaatgagatctctgt

SEQ ID NO: 39749 - RNA, 21 nt, RNAi
agaccaaugagaucucuguuu

SEQ ID NO: 39750 - RNA, 21 nt, RNAi
uuucugguuacucuagagaca

SEQ ID NO: 39751 - DNA, 21 bp, homo sapiens
gaccaatgagatctctgtgat

SEQ ID NO: 39752 - RNA, 21 nt, RNAi
ccaaugagaucucugugauuu

SEQ ID NO: 39753 - RNA, 21 nt, RNAi
uugguuacucuagagacacua

SEQ ID NO: 39754 - DNA, 21 bp, homo sapiens
gagatctctgtgatccagagt

SEQ ID NO: 39755 - RNA, 21 nt, RNAi
gaucucugugauccagaguuu

SEQ ID NO: 39756 - RNA, 21 nt, RNAi
uucuagagacacuaggucuca

SEQ ID NO: 39757 - DNA, 21 bp, homo sapiens
gatctctgtgatccagagtgg

SEQ ID NO: 39758 - RNA, 21 nt, RNAi
ucucugugauccagagugguu

SEQ ID NO: 39759 - RNA, 21 nt, RNAi
uuagagacacuaggucucacc

SEQ ID NO: 39760 - DNA, 21 bp, homo sapiens
gaataacgccactgtctccaa

SEQ ID NO: 39761 - RNA, 21 nt, RNAi
auaacgccacugucuccaauu

SEQ ID NO: 39762 - RNA, 21 nt, RNAi
uuuauugcggugacagagguu

SEQ ID NO: 39763 - DNA, 21 bp, homo sapiens
tacctaaagacagagacagcc

SEQ ID NO: 39764 - RNA, 21 nt, RNAi
ccuaaagacagagacagccuu

SEQ ID NO: 39765 - RNA, 21 nt, RNAi
uuggauuucugucucugucgg

SEQ ID NO: 39766 - DNA, 21 bp, homo sapiens
taagctatttagccaaaggca

SEQ ID NO: 39767 - RNA, 21 nt, RNAi
agcuauuuagccaaaggcauu

SEQ ID NO: 39768 - RNA, 21 nt, RNAi
uuucgauaaaucgguuuccgu

SEQ ID NO: 39769 - DNA, 21 bp, homo sapiens
tatttagccaaaggcaaagtg

SEQ ID NO: 39770 - RNA, 21 nt, RNAi
uuuagccaaaggcaaaguguu

SEQ ID NO: 39771 - RNA, 21 nt, RNAi
uuaaaucgguuuccguuucac

SEQ ID NO: 39772 - DNA, 21 bp, homo sapiens
tagccaaaggcaaagtggcca

SEQ ID NO: 39773 - RNA, 21 nt, RNAi
gccaaaggcaaaguggccauu

SEQ ID NO: 39774 - RNA, 21 nt, RNAi
uucgguuuccguuucaccggu

SEQ ID NO: 39775 - DNA, 21 bp, homo sapiens
taatgtgaccttgcaggcact

SEQ ID NO: 39776 - RNA, 21 nt, RNAi
augugaccuugcaggcacuuu

SEQ ID NO: 39777 - RNA, 21 nt, RNAi
uuuacacuggaacguccguga

SEQ ID NO: 39778 - DNA, 21 bp, homo sapiens
tacagcagatccagctcaccg

SEQ ID NO: 39779 - RNA, 21 nt, RNAi
cagcagauccagcucaccguu

SEQ ID NO: 39780 - RNA, 21 nt, RNAi
uugucgucuaggucgaguggc

SEQ ID NO: 39781 - DNA, 21 bp, homo sapiens
tacaagcacaagtgtaagtac

SEQ ID NO: 39782 - RNA, 21 nt, RNAi
caagcacaaguguaaguacuu

SEQ ID NO: 39783 - RNA, 21 nt, RNAi
uuguucguguucacauucaug

SEQ ID NO: 39784 - DNA, 21 bp, homo sapiens
tagctccttgcagatccacct

SEQ ID NO: 39785 - RNA, 21 nt, RNAi
gcuccuugcagauccaccuuu

SEQ ID NO: 39786 - RNA, 21 nt, RNAi
uucgaggaacgucuaggugga

SEQ ID NO: 39787 - DNA, 21 bp, homo sapiens
tatgcactctctgtacctgac

SEQ ID NO: 39788 - RNA, 21 nt, RNAi
ugcacucucuguaccugacuu

SEQ ID NO: 39789 - RNA, 21 nt, RNAi
uuacgugagagacauggacug

SEQ ID NO: 39790 - DNA, 21 bp, homo sapiens
tagatgaaccgagtctttctt

SEQ ID NO: 39791 - RNA, 21 nt, RNAi
gaugaaccgagucuuucuuuu

SEQ ID NO: 39792 - RNA, 21 nt, RNAi
uucuacuuggcucagaaagaa

SEQ ID NO: 39793 - DNA, 21 bp, homo sapiens
tagacagcaaacctgtccttg

SEQ ID NO: 39794 - RNA, 21 nt, RNAi
gacagcaaaccuguccuuguu

SEQ ID NO: 39795 - RNA, 21 nt, RNAi
uucugucguuuggacaggaac

SEQ ID NO: 39796 - DNA, 21 bp, homo sapiens
tacctcagaatctttcttcgg

SEQ ID NO: 39797 - RNA, 21 nt, RNAi
ccucagaaucuuucuucgguu

SEQ ID NO: 39798 - RNA, 21 nt, RNAi
uuggagucuuagaaagaagcc

SEQ ID NO: 39799 - DNA, 21 bp, homo sapiens
taagatctgtggccgagcctt

SEQ ID NO: 39800 - RNA, 21 nt, RNAi
agaucuguggccgagccuuuu

SEQ ID NO: 39801 - RNA, 21 nt, RNAi
uuucuagacaccggcucggaa

SEQ ID NO: 39802 - DNA, 21 bp, homo sapiens
taccaaaggtaacctgaagac

SEQ ID NO: 39803 - RNA, 21 nt, RNAi
ccaaagguaaccugaagacuu

SEQ ID NO: 39804 - RNA, 21 nt, RNAi
uugguuuccauuggacuucug

SEQ ID NO: 39805 - DNA, 21 bp, homo sapiens
taacctgaagacacaccttgg

SEQ ID NO: 39806 - RNA, 21 nt, RNAi
accugaagacacaccuugguu

SEQ ID NO: 39807 - RNA, 21 nt, RNAi
uuuggacuucuguguggaacc

SEQ ID NO: 39808 - DNA, 21 bp, homo sapiens
taatgccgtgatgctgcagca

SEQ ID NO: 39809 - RNA, 21 nt, RNAi
augccgugaugcugcagcauu

SEQ ID NO: 39810 - RNA, 21 nt, RNAi
uuuacggcacuacgacgucgu

SEQ ID NO: 39811 - DNA, 21 bp, homo sapiens
tatctgccatgatgatgtcat

SEQ ID NO: 39812 - RNA, 21 nt, RNAi
ucugccaugaugaugucauuu

SEQ ID NO: 39813 - RNA, 21 nt, RNAi
uuagacgguacuacuacagua

SEQ ID NO: 39814 - DNA, 21 bp, homo sapiens
tatcctggaaaccacatcctt

SEQ ID NO: 39815 - RNA, 21 nt, RNAi
uccuggaaaccacauccuuuu

SEQ ID NO: 39816 - RNA, 21 nt, RNAi
uuaggaccuuugguguaggaa

SEQ ID NO: 39817 - DNA, 21 bp, homo sapiens
tagtcaagccgaaagcatcaa

SEQ ID NO: 39818 - RNA, 21 nt, RNAi
gucaagccgaaagcaucaauu

SEQ ID NO: 39819 - RNA, 21 nt, RNAi
uucaguucggcuuucguaguu

SEQ ID NO: 39820 - DNA, 21 bp, homo sapiens
tatgtcaaggttgaagttcct

SEQ ID NO: 39821 - RNA, 21 nt, RNAi
ugucaagguugaaguuccuuu

SEQ ID NO: 39822 - RNA, 21 nt, RNAi
uuacaguuccaacuucaagga

SEQ ID NO: 39823 - DNA, 21 bp, homo sapiens
tagcgctcttcagatccacga

SEQ ID NO: 39824 - RNA, 21 nt, RNAi
gcgcucuucagauccacgauu

SEQ ID NO: 39825 - RNA, 21 nt, RNAi
uucgcgagaagucuaggugcu

SEQ ID NO: 39826 - DNA, 21 bp, homo sapiens
taccaccaaaggcaacttaaa

SEQ ID NO: 39827 - RNA, 21 nt, RNAi
ccaccaaaggcaacuuaaauu

SEQ ID NO: 39828 - RNA, 21 nt, RNAi
uuggugguuuccguugaauuu

SEQ ID NO: 39829 - DNA, 21 bp, homo sapiens
taaaggttcactacatgacac

SEQ ID NO: 39830 - RNA, 21 nt, RNAi
aagguucacuacaugacacuu

SEQ ID NO: 39831 - RNA, 21 nt, RNAi
uuuuccaagugauguacugug

SEQ ID NO: 39832 - DNA, 21 bp, homo sapiens
tacaccagcatgctcaatggc

SEQ ID NO: 39833 - RNA, 21 nt, RNAi
caccagcaugcucaauggcuu

SEQ ID NO: 39834 - RNA, 21 nt, RNAi
uuguggucguacgaguuaccg

SEQ ID NO: 39835 - DNA, 21 bp, homo sapiens
taacgccactgtctccaagat

SEQ ID NO: 39836 - RNA, 21 nt, RNAi
acgccacugucuccaagauuu

SEQ ID NO: 39837 - RNA, 21 nt, RNAi
uuugcggugacagagguucua

SEQ ID NO: 39838 - DNA, 21 bp, homo sapiens
aagtgtaagtactgtagcaag

SEQ ID NO: 39839 - RNA, 21 nt, RNAi
guguaaguacuguagcaaguu

SEQ ID NO: 39840 - RNA, 21 nt, RNAi
uucacauucaugacaucguuc

SEQ ID NO: 39841 - DNA, 21 bp, homo sapiens
aacctcaaggtgcactttcac

SEQ ID NO: 39842 - RNA, 21 nt, RNAi
ccucaaggugcacuuucacuu

SEQ ID NO: 39843 - RNA, 21 nt, RNAi
uuggaguuccacgugaaagug

SEQ ID NO: 39844 - DNA, 21 bp, homo sapiens
aaggtgcactttcaccgacat

SEQ ID NO: 39845 - RNA, 21 nt, RNAi
ggugcacuuucaccgacauuu

SEQ ID NO: 39846 - RNA, 21 nt, RNAi
uuccacgugaaaguggcugua

SEQ ID NO: 39847 - DNA, 21 bp, homo sapiens
aacatattcggatgcacatgg

SEQ ID NO: 39848 - RNA, 21 nt, RNAi
cauauucggaugcacaugguu

SEQ ID NO: 39849 - RNA, 21 nt, RNAi
uuguauaagccuacguguacc

SEQ ID NO: 39850 - DNA, 21 bp, homo sapiens
aaagcatcgatgtagaggaag

SEQ ID NO: 39851 - RNA, 21 nt, RNAi
agcaucgauguagaggaaguu

SEQ ID NO: 39852 - RNA, 21 nt, RNAi
uuucguagcuacaucuccuuc

SEQ ID NO: 39853 - DNA, 21 bp, homo sapiens
aagcatcgatgtagaggaagt

SEQ ID NO: 39854 - RNA, 21 nt, RNAi
gcaucgauguagaggaaguuu

SEQ ID NO: 39855 - RNA, 21 nt, RNAi
uucguagcuacaucuccuuca

SEQ ID NO: 39856 - DNA, 21 bp, homo sapiens
aagaacttctcgtctgctagc

SEQ ID NO: 39857 - RNA, 21 nt, RNAi
gaacuucucgucugcuagcuu

SEQ ID NO: 39858 - RNA, 21 nt, RNAi
uucuugaagagcagacgaucg

SEQ ID NO: 39859 - DNA, 21 bp, homo sapiens
aaaggttcactacatgacaca

SEQ ID NO: 39860 - RNA, 21 nt, RNAi
agguucacuacaugacacauu

SEQ ID NO: 39861 - RNA, 21 nt, RNAi
uuuccaagugauguacugugu

SEQ ID NO: 39862 - DNA, 21 bp, homo sapiens
aaggttcactacatgacacac

SEQ ID NO: 39863 - RNA, 21 nt, RNAi
gguucacuacaugacacacuu

SEQ ID NO: 39864 - RNA, 21 nt, RNAi
uuccaagugauguacugugug

SEQ ID NO: 39865 - DNA, 21 bp, homo sapiens
aacaccatggctctgttaggt

SEQ ID NO: 39866 - RNA, 21 nt, RNAi
caccauggcucuguuagguuu

SEQ ID NO: 39867 - RNA, 21 nt, RNAi
uugugguaccgagacaaucca

SEQ ID NO: 39868 - DNA, 21 bp, homo sapiens
catgtctcagcaggtttctgc

SEQ ID NO: 39869 - RNA, 21 nt, RNAi
ugucucagcagguuucugcuu

SEQ ID NO: 39870 - RNA, 21 nt, RNAi
uuacagagucguccaaagacg

SEQ ID NO: 39871 - DNA, 21 bp, homo sapiens
caagctacctcacgccaacat

SEQ ID NO: 39872 - RNA, 21 nt, RNAi
agcuaccucacgccaacauuu

SEQ ID NO: 39873 - RNA, 21 nt, RNAi
uuucgauggagugcgguugua

SEQ ID NO: 39874 - DNA, 21 bp, homo sapiens
cacaagtgtaagtactgtagc

SEQ ID NO: 39875 - RNA, 21 nt, RNAi
caaguguaaguacuguagcuu

SEQ ID NO: 39876 - RNA, 21 nt, RNAi
uuguucacauucaugacaucg

SEQ ID NO: 39877 - DNA, 21 bp, homo sapiens
caagtgtaagtactgtagcaa

SEQ ID NO: 39878 - RNA, 21 nt, RNAi
aguguaaguacuguagcaauu

SEQ ID NO: 39879 - RNA, 21 nt, RNAi
uuucacauucaugacaucguu

SEQ ID NO: 39880 - DNA, 21 bp, homo sapiens
caacctcaaggtgcactttca

SEQ ID NO: 39881 - RNA, 21 nt, RNAi
accucaaggugcacuuucauu

SEQ ID NO: 39882 - RNA, 21 nt, RNAi
uuuggaguuccacgugaaagu

SEQ ID NO: 39883 - DNA, 21 bp, homo sapiens
caaggtgcactttcaccgaca

SEQ ID NO: 39884 - RNA, 21 nt, RNAi
aggugcacuuucaccgacauu

SEQ ID NO: 39885 - RNA, 21 nt, RNAi
uuuccacgugaaaguggcugu

SEQ ID NO: 39886 - DNA, 21 bp, homo sapiens
cagcaacatattcggatgcac

SEQ ID NO: 39887 - RNA, 21 nt, RNAi
gcaacauauucggaugcacuu

SEQ ID NO: 39888 - RNA, 21 nt, RNAi
uucguuguauaagccuacgug

SEQ ID NO: 39889 - DNA, 21 bp, homo sapiens
caacatattcggatgcacatg

SEQ ID NO: 39890 - RNA, 21 nt, RNAi
acauauucggaugcacauguu

SEQ ID NO: 39891 - RNA, 21 nt, RNAi
uuuguauaagccuacguguac

SEQ ID NO: 39892 - DNA, 21 bp, homo sapiens
catcgaaagcatcgatgtaga

SEQ ID NO: 39893 - RNA, 21 nt, RNAi
ucgaaagcaucgauguagauu

SEQ ID NO: 39894 - RNA, 21 nt, RNAi
uuagcuuucguagcuacaucu

SEQ ID NO: 39895 - DNA, 21 bp, homo sapiens
caacgactcatcctcgctgat

SEQ ID NO: 39896 - RNA, 21 nt, RNAi
acgacucauccucgcugauuu

SEQ ID NO: 39897 - RNA, 21 nt, RNAi
uuugcugaguaggagcgacua

SEQ ID NO: 39898 - DNA, 21 bp, homo sapiens
caagccgaaagcatcaagtca

SEQ ID NO: 39899 - RNA, 21 nt, RNAi
agccgaaagcaucaagucauu

SEQ ID NO: 39900 - RNA, 21 nt, RNAi
uuucggcuuucguaguucagu

SEQ ID NO: 39901 - DNA, 21 bp, homo sapiens
catcgagaacaccatggctct

SEQ ID NO: 39902 - RNA, 21 nt, RNAi
ucgagaacaccauggcucuuu

SEQ ID NO: 39903 - RNA, 21 nt, RNAi
uuagcucuugugguaccgaga

SEQ ID NO: 39904 - DNA, 21 bp, homo sapiens
caccatggctctgttaggtac

SEQ ID NO: 39905 - RNA, 21 nt, RNAi
ccauggcucuguuagguacuu

SEQ ID NO: 39906 - RNA, 21 nt, RNAi
uugguaccgagacaauccaug

SEQ ID NO: 39907 - DNA, 21 bp, homo sapiens
catggctctgttaggtacgga

SEQ ID NO: 39908 - RNA, 21 nt, RNAi
uggcucuguuagguacggauu

SEQ ID NO: 39909 - RNA, 21 nt, RNAi
uuaccgagacaauccaugccu

SEQ ID NO: 39910 - DNA, 21 bp, homo sapiens
gaaagcatcgatgtagaggaa

SEQ ID NO: 39911 - RNA, 21 nt, RNAi
aagcaucgauguagaggaauu

SEQ ID NO: 39912 - RNA, 21 nt, RNAi
uuuucguagcuacaucuccuu

SEQ ID NO: 39913 - DNA, 21 bp, homo sapiens
gacctatgtcaaggttgaagt

SEQ ID NO: 39914 - RNA, 21 nt, RNAi
ccuaugucaagguugaaguuu

SEQ ID NO: 39915 - RNA, 21 nt, RNAi
uuggauacaguuccaacuuca

SEQ ID NO: 39916 - DNA, 21 bp, homo sapiens
gaagaacttctcgtctgctag

SEQ ID NO: 39917 - RNA, 21 nt, RNAi
agaacuucucgucugcuaguu

SEQ ID NO: 39918 - RNA, 21 nt, RNAi
uuucuugaagagcagacgauc

SEQ ID NO: 39919 - DNA, 21 bp, homo sapiens
gaagaccaatgagatctctgt

SEQ ID NO: 39920 - RNA, 21 nt, RNAi
agaccaaugagaucucuguuu

SEQ ID NO: 39921 - RNA, 21 nt, RNAi
uuucugguuacucuagagaca

SEQ ID NO: 39922 - DNA, 21 bp, homo sapiens
gaataacgccactgtctccaa

SEQ ID NO: 39923 - RNA, 21 nt, RNAi
auaacgccacugucuccaauu

SEQ ID NO: 39924 - RNA, 21 nt, RNAi
uuuauugcggugacagagguu

SEQ ID NO: 39925 - DNA, 21 bp, homo sapiens
aaacaagttcttatgtcggtg

SEQ ID NO: 39926 - RNA, 21 nt, RNAi
acaaguucuuaugucgguguu

SEQ ID NO: 39927 - RNA, 21 nt, RNAi
uuuguucaagaauacagccac

SEQ ID NO: 39928 - DNA, 21 bp, homo sapiens
aacaagttcttatgtcggtgc

SEQ ID NO: 39929 - RNA, 21 nt, RNAi
caaguucuuaugucggugcuu

SEQ ID NO: 39930 - RNA, 21 nt, RNAi
uuguucaagaauacagccacg

SEQ ID NO: 39931 - DNA, 21 bp, homo sapiens
aagttcttatgtcggtgccag

SEQ ID NO: 39932 - RNA, 21 nt, RNAi
guucuuaugucggugccaguu

SEQ ID NO: 39933 - RNA, 21 nt, RNAi
uucaagaauacagccacgguc

SEQ ID NO: 39934 - DNA, 21 bp, homo sapiens
aatgtgccacacacagcacag

SEQ ID NO: 39935 - RNA, 21 nt, RNAi
ugugccacacacagcacaguu

SEQ ID NO: 39936 - RNA, 21 nt, RNAi
uuacacggugugugucguguc

SEQ ID NO: 39937 - DNA, 21 bp, homo sapiens
aaagacagagtggcggtagca

SEQ ID NO: 39938 - RNA, 21 nt, RNAi
agacagaguggcgguagcauu

SEQ ID NO: 39939 - RNA, 21 nt, RNAi
uuucugucucaccgccaucgu

SEQ ID NO: 39940 - DNA, 21 bp, homo sapiens
aagacagagtggcggtagcag

SEQ ID NO: 39941 - RNA, 21 nt, RNAi
gacagaguggcgguagcaguu

SEQ ID NO: 39942 - RNA, 21 nt, RNAi
uucugucucaccgccaucguc

SEQ ID NO: 39943 - DNA, 21 bp, homo sapiens
aaatttgagattggagaggct

SEQ ID NO: 39944 - RNA, 21 nt, RNAi
auuugagauuggagaggcuuu

SEQ ID NO: 39945 - RNA, 21 nt, RNAi
uuuaaacucuaaccucuccga

SEQ ID NO: 39946 - DNA, 21 bp, homo sapiens
aatttgagattggagaggctc

SEQ ID NO: 39947 - RNA, 21 nt, RNAi
uuugagauuggagaggcucuu

SEQ ID NO: 39948 - RNA, 21 nt, RNAi
uuaaacucuaaccucuccgag

SEQ ID NO: 39949 - DNA, 21 bp, homo sapiens
aaatcgctccaactactacga

SEQ ID NO: 39950 - RNA, 21 nt, RNAi
aucgcuccaacuacuacgauu

SEQ ID NO: 39951 - RNA, 21 nt, RNAi
uuuagcgagguugaugaugcu

SEQ ID NO: 39952 - DNA, 21 bp, homo sapiens
aatcgctccaactactacgat

SEQ ID NO: 39953 - RNA, 21 nt, RNAi
ucgcuccaacuacuacgauuu

SEQ ID NO: 39954 - RNA, 21 nt, RNAi
uuagcgagguugaugaugcua

SEQ ID NO: 39955 - DNA, 21 bp, homo sapiens
aactactacgatgcctaccaa

SEQ ID NO: 39956 - RNA, 21 nt, RNAi
cuacuacgaugccuaccaauu

SEQ ID NO: 39957 - RNA, 21 nt, RNAi
uugaugaugcuacggaugguu

SEQ ID NO: 39958 - DNA, 21 bp, homo sapiens
aacctcttgccacaaggagct

SEQ ID NO: 39959 - RNA, 21 nt, RNAi
ccucuugccacaaggagcuuu

SEQ ID NO: 39960 - RNA, 21 nt, RNAi
uuggagaacgguguuccucga

SEQ ID NO: 39961 - DNA, 21 bp, homo sapiens
aaggagctctccaaggcctgg

SEQ ID NO: 39962 - RNA, 21 nt, RNAi
ggagcucuccaaggccugguu

SEQ ID NO: 39963 - RNA, 21 nt, RNAi
uuccucgagagguuccggacc

SEQ ID NO: 39964 - DNA, 21 bp, homo sapiens
aaagtcaagagtgagttcaat

SEQ ID NO: 39965 - RNA, 21 nt, RNAi
agucaagagugaguucaauuu

SEQ ID NO: 39966 - RNA, 21 nt, RNAi
uuucaguucucacucaaguua

SEQ ID NO: 39967 - DNA, 21 bp, homo sapiens
aagtcaagagtgagttcaatt

SEQ ID NO: 39968 - RNA, 21 nt, RNAi
gucaagagugaguucaauuuu

SEQ ID NO: 39969 - RNA, 21 nt, RNAi
uucaguucucacucaaguuaa

SEQ ID NO: 39970 - DNA, 21 bp, homo sapiens
aagagtgagttcaattcctac

SEQ ID NO: 39971 - RNA, 21 nt, RNAi
gagugaguucaauuccuacuu

SEQ ID NO: 39972 - RNA, 21 nt, RNAi
uucucacucaaguuaaggaug

SEQ ID NO: 39973 - DNA, 21 bp, homo sapiens
cacactggttgccatgctgct

SEQ ID NO: 39974 - RNA, 21 nt, RNAi
cacugguugccaugcugcuuu

SEQ ID NO: 39975 - RNA, 21 nt, RNAi
uugugaccaacgguacgacga

SEQ ID NO: 39976 - DNA, 21 bp, homo sapiens
cactggttgccatgctgctcc

SEQ ID NO: 39977 - RNA, 21 nt, RNAi
cugguugccaugcugcuccuu

SEQ ID NO: 39978 - RNA, 21 nt, RNAi
uugaccaacgguacgacgagg

SEQ ID NO: 39979 - DNA, 21 bp, homo sapiens
caagttcttatgtcggtgcca

SEQ ID NO: 39980 - RNA, 21 nt, RNAi
aguucuuaugucggugccauu

SEQ ID NO: 39981 - RNA, 21 nt, RNAi
uuucaagaauacagccacggu

SEQ ID NO: 39982 - DNA, 21 bp, homo sapiens
cagcattgtgacagcagttgg

SEQ ID NO: 39983 - RNA, 21 nt, RNAi
gcauugugacagcaguugguu

SEQ ID NO: 39984 - RNA, 21 nt, RNAi
uucguaacacugucgucaacc

SEQ ID NO: 39985 - DNA, 21 bp, homo sapiens
cattgtgacagcagttggctt

SEQ ID NO: 39986 - RNA, 21 nt, RNAi
uugugacagcaguuggcuuuu

SEQ ID NO: 39987 - RNA, 21 nt, RNAi
uuaacacugucgucaaccgaa

SEQ ID NO: 39988 - DNA, 21 bp, homo sapiens
cagcagttggcttctccaagg

SEQ ID NO: 39989 - RNA, 21 nt, RNAi
gcaguuggcuucuccaagguu

SEQ ID NO: 39990 - RNA, 21 nt, RNAi
uucgucaaccgaagagguucc

SEQ ID NO: 39991 - DNA, 21 bp, homo sapiens
cacacacagcacaggcatcac

SEQ ID NO: 39992 - RNA, 21 nt, RNAi
cacacagcacaggcaucacuu

SEQ ID NO: 39993 - RNA, 21 nt, RNAi
uugugugucguguccguagug

SEQ ID NO: 39994 - DNA, 21 bp, homo sapiens
cagtgtgacatctatagcacc

SEQ ID NO: 39995 - RNA, 21 nt, RNAi
gugugacaucuauagcaccuu

SEQ ID NO: 39996 - RNA, 21 nt, RNAi
uucacacuguagauaucgugg

SEQ ID NO: 39997 - DNA, 21 bp, homo sapiens
caggccatgatggtgacatcc

SEQ ID NO: 39998 - RNA, 21 nt, RNAi
ggccaugauggugacauccuu

SEQ ID NO: 39999 - RNA, 21 nt, RNAi
uuccgguacuaccacuguagg

SEQ ID NO: 40000 - DNA, 21 bp, homo sapiens
catgatggtgacatccagtgc

SEQ ID NO: 40001 - RNA, 21 nt, RNAi
ugauggugacauccagugcuu

SEQ ID NO: 40002 - RNA, 21 nt, RNAi
uuacuaccacuguaggucacg

SEQ ID NO: 40003 - DNA, 21 bp, homo sapiens
catgagatgcacagtcttctg

SEQ ID NO: 40004 - RNA, 21 nt, RNAi
ugagaugcacagucuucuguu

SEQ ID NO: 40005 - RNA, 21 nt, RNAi
uuacucuacgugucagaagac

SEQ ID NO: 40006 - DNA, 21 bp, homo sapiens
cacagtcttctgccaggaatc

SEQ ID NO: 40007 - RNA, 21 nt, RNAi
cagucuucugccaggaaucuu

SEQ ID NO: 40008 - RNA, 21 nt, RNAi
uugucagaagacgguccuuag

SEQ ID NO: 40009 - DNA, 21 bp, homo sapiens
caaagacagagtggcggtagc

SEQ ID NO: 40010 - RNA, 21 nt, RNAi
aagacagaguggcgguagcuu

SEQ ID NO: 40011 - RNA, 21 nt, RNAi
uuuucugucucaccgccaucg

SEQ ID NO: 40012 - DNA, 21 bp, homo sapiens
cattcctgttgcctggaatct

SEQ ID NO: 40013 - RNA, 21 nt, RNAi
uuccuguugccuggaaucuuu

SEQ ID NO: 40014 - RNA, 21 nt, RNAi
uuaaggacaacggaccuuaga

SEQ ID NO: 40015 - DNA, 21 bp, homo sapiens
caccactggtgcctgacagca

SEQ ID NO: 40016 - RNA, 21 nt, RNAi
ccacuggugccugacagcauu

SEQ ID NO: 40017 - RNA, 21 nt, RNAi
uuggugaccacggacugucgu

SEQ ID NO: 40018 - DNA, 21 bp, homo sapiens
cactggtgcctgacagcatga

SEQ ID NO: 40019 - RNA, 21 nt, RNAi
cuggugccugacagcaugauu

SEQ ID NO: 40020 - RNA, 21 nt, RNAi
uugaccacggacugucguacu

SEQ ID NO: 40021 - DNA, 21 bp, homo sapiens
cagcatgaaatttgagattgg

SEQ ID NO: 40022 - RNA, 21 nt, RNAi
gcaugaaauuugagauugguu

SEQ ID NO: 40023 - RNA, 21 nt, RNAi
uucguacuuuaaacucuaacc

SEQ ID NO: 40024 - DNA, 21 bp, homo sapiens
catgaaatttgagattggaga

SEQ ID NO: 40025 - RNA, 21 nt, RNAi
ugaaauuugagauuggagauu

SEQ ID NO: 40026 - RNA, 21 nt, RNAi
uuacuuuaaacucuaaccucu

SEQ ID NO: 40027 - DNA, 21 bp, homo sapiens
cagagaaatcgctccaactac

SEQ ID NO: 40028 - RNA, 21 nt, RNAi
gagaaaucgcuccaacuacuu

SEQ ID NO: 40029 - RNA, 21 nt, RNAi
uucucuuuagcgagguugaug

SEQ ID NO: 40030 - DNA, 21 bp, homo sapiens
caactactacgatgcctacca

SEQ ID NO: 40031 - RNA, 21 nt, RNAi
acuacuacgaugccuaccauu

SEQ ID NO: 40032 - RNA, 21 nt, RNAi
uuugaugaugcuacggauggu

SEQ ID NO: 40033 - DNA, 21 bp, homo sapiens
caacctcttgccacaaggagc

SEQ ID NO: 40034 - RNA, 21 nt, RNAi
accucuugccacaaggagcuu

SEQ ID NO: 40035 - RNA, 21 nt, RNAi
uuuggagaacgguguuccucg

SEQ ID NO: 40036 - DNA, 21 bp, homo sapiens
cacaaggagctctccaaggcc

SEQ ID NO: 40037 - RNA, 21 nt, RNAi
caaggagcucuccaaggccuu

SEQ ID NO: 40038 - RNA, 21 nt, RNAi
uuguuccucgagagguuccgg

SEQ ID NO: 40039 - DNA, 21 bp, homo sapiens
caaggagctctccaaggcctg

SEQ ID NO: 40040 - RNA, 21 nt, RNAi
aggagcucuccaaggccuguu

SEQ ID NO: 40041 - RNA, 21 nt, RNAi
uuuccucgagagguuccggac

SEQ ID NO: 40042 - DNA, 21 bp, homo sapiens
caaagtcaagagtgagttcaa

SEQ ID NO: 40043 - RNA, 21 nt, RNAi
aagucaagagugaguucaauu

SEQ ID NO: 40044 - RNA, 21 nt, RNAi
uuuucaguucucacucaaguu

SEQ ID NO: 40045 - DNA, 21 bp, homo sapiens
caagagtgagttcaattccta

SEQ ID NO: 40046 - RNA, 21 nt, RNAi
agagugaguucaauuccuauu

SEQ ID NO: 40047 - RNA, 21 nt, RNAi
uuucucacucaaguuaaggau

SEQ ID NO: 40048 - DNA, 21 bp, homo sapiens
caattcctacagcctgacagg

SEQ ID NO: 40049 - RNA, 21 nt, RNAi
auuccuacagccugacagguu

SEQ ID NO: 40050 - RNA, 21 nt, RNAi
uuuaaggaugucggacugucc

SEQ ID NO: 40051 - DNA, 21 bp, homo sapiens
gacagcagttggcttctccaa

SEQ ID NO: 40052 - RNA, 21 nt, RNAi
cagcaguuggcuucuccaauu

SEQ ID NO: 40053 - RNA, 21 nt, RNAi
uugucgucaaccgaagagguu

SEQ ID NO: 40054 - DNA, 21 bp, homo sapiens
gatggaatgtgccacacacag

SEQ ID NO: 40055 - RNA, 21 nt, RNAi
uggaaugugccacacacaguu

SEQ ID NO: 40056 - RNA, 21 nt, RNAi
uuaccuuacacgguguguguc

SEQ ID NO: 40057 - DNA, 21 bp, homo sapiens
gaatgtgccacacacagcaca

SEQ ID NO: 40058 - RNA, 21 nt, RNAi
augugccacacacagcacauu

SEQ ID NO: 40059 - RNA, 21 nt, RNAi
uuuacacggugugugucgugu

SEQ ID NO: 40060 - DNA, 21 bp, homo sapiens
gatggtgacatccagtgcaat

SEQ ID NO: 40061 - RNA, 21 nt, RNAi
uggugacauccagugcaauuu

SEQ ID NO: 40062 - RNA, 21 nt, RNAi
uuaccacuguaggucacguua

SEQ ID NO: 40063 - DNA, 21 bp, homo sapiens
gacatccagtgcaatctcctc

SEQ ID NO: 40064 - RNA, 21 nt, RNAi
cauccagugcaaucuccucuu

SEQ ID NO: 40065 - RNA, 21 nt, RNAi
uuguaggucacguuagaggag

SEQ ID NO: 40066 - DNA, 21 bp, homo sapiens
gagatgcacagtcttctgcca

SEQ ID NO: 40067 - RNA, 21 nt, RNAi
gaugcacagucuucugccauu

SEQ ID NO: 40068 - RNA, 21 nt, RNAi
uucuacgugucagaagacggu

SEQ ID NO: 40069 - DNA, 21 bp, homo sapiens
gatgcacagtcttctgccagg

SEQ ID NO: 40070 - RNA, 21 nt, RNAi
ugcacagucuucugccagguu

SEQ ID NO: 40071 - RNA, 21 nt, RNAi
uuacgugucagaagacggucc

SEQ ID NO: 40072 - DNA, 21 bp, homo sapiens
gagccaaagacagagtggcgg

SEQ ID NO: 40073 - RNA, 21 nt, RNAi
gccaaagacagaguggcgguu

SEQ ID NO: 40074 - RNA, 21 nt, RNAi
uucgguuucugucucaccgcc

SEQ ID NO: 40075 - DNA, 21 bp, homo sapiens
gacagagtggcggtagcaggt

SEQ ID NO: 40076 - RNA, 21 nt, RNAi
cagaguggcgguagcagguuu

SEQ ID NO: 40077 - RNA, 21 nt, RNAi
uugucucaccgccaucgucca

SEQ ID NO: 40078 - DNA, 21 bp, homo sapiens
gattcattcctgttgcctgga

SEQ ID NO: 40079 - RNA, 21 nt, RNAi
uucauuccuguugccuggauu

SEQ ID NO: 40080 - RNA, 21 nt, RNAi
uuaaguaaggacaacggaccu

SEQ ID NO: 40081 - DNA, 21 bp, homo sapiens
gacttctactcaccactggtg

SEQ ID NO: 40082 - RNA, 21 nt, RNAi
cuucuacucaccacugguguu

SEQ ID NO: 40083 - RNA, 21 nt, RNAi
uugaagaugaguggugaccac

SEQ ID NO: 40084 - DNA, 21 bp, homo sapiens
gacagcatgaaatttgagatt

SEQ ID NO: 40085 - RNA, 21 nt, RNAi
cagcaugaaauuugagauuuu

SEQ ID NO: 40086 - RNA, 21 nt, RNAi
uugucguacuuuaaacucuaa

SEQ ID NO: 40087 - DNA, 21 bp, homo sapiens
gaaatttgagattggagaggc

SEQ ID NO: 40088 - RNA, 21 nt, RNAi
aauuugagauuggagaggcuu

SEQ ID NO: 40089 - RNA, 21 nt, RNAi
uuuuaaacucuaaccucuccg

SEQ ID NO: 40090 - DNA, 21 bp, homo sapiens
gagattggagaggctctttac

SEQ ID NO: 40091 - RNA, 21 nt, RNAi
gauuggagaggcucuuuacuu

SEQ ID NO: 40092 - RNA, 21 nt, RNAi
uucuaaccucuccgagaaaug

SEQ ID NO: 40093 - DNA, 21 bp, homo sapiens
gattggagaggctctttactt

SEQ ID NO: 40094 - RNA, 21 nt, RNAi
uuggagaggcucuuuacuuuu

SEQ ID NO: 40095 - RNA, 21 nt, RNAi
uuaaccucuccgagaaaugaa

SEQ ID NO: 40096 - DNA, 21 bp, homo sapiens
gatagctggaatcatcctctg

SEQ ID NO: 40097 - RNA, 21 nt, RNAi
uagcuggaaucauccucuguu

SEQ ID NO: 40098 - RNA, 21 nt, RNAi
uuaucgaccuuaguaggagac

SEQ ID NO: 40099 - DNA, 21 bp, homo sapiens
gagaaatcgctccaactacta

SEQ ID NO: 40100 - RNA, 21 nt, RNAi
gaaaucgcuccaacuacuauu

SEQ ID NO: 40101 - RNA, 21 nt, RNAi
uucuuuagcgagguugaugau

SEQ ID NO: 40102 - DNA, 21 bp, homo sapiens
gaaatcgctccaactactacg

SEQ ID NO: 40103 - RNA, 21 nt, RNAi
aaucgcuccaacuacuacguu

SEQ ID NO: 40104 - RNA, 21 nt, RNAi
uuuuagcgagguugaugaugc

SEQ ID NO: 40105 - DNA, 21 bp, homo sapiens
gagctctccaaggcctggtca

SEQ ID NO: 40106 - RNA, 21 nt, RNAi
gcucuccaaggccuggucauu

SEQ ID NO: 40107 - RNA, 21 nt, RNAi
uucgagagguuccggaccagu

SEQ ID NO: 40108 - DNA, 21 bp, homo sapiens
gagtgagttcaattcctacag

SEQ ID NO: 40109 - RNA, 21 nt, RNAi
gugaguucaauuccuacaguu

SEQ ID NO: 40110 - RNA, 21 nt, RNAi
uucacucaaguuaaggauguc

SEQ ID NO: 40111 - DNA, 21 bp, homo sapiens
gagttcaattcctacagcctg

SEQ ID NO: 40112 - RNA, 21 nt, RNAi
guucaauuccuacagccuguu

SEQ ID NO: 40113 - RNA, 21 nt, RNAi
uucaaguuaaggaugucggac

SEQ ID NO: 40114 - DNA, 21 bp, homo sapiens
tatgtcggtgccagcattgtg

SEQ ID NO: 40115 - RNA, 21 nt, RNAi
ugucggugccagcauuguguu

SEQ ID NO: 40116 - RNA, 21 nt, RNAi
uuacagccacggucguaacac

SEQ ID NO: 40117 - DNA, 21 bp, homo sapiens
tactcaccactggtgcctgac

SEQ ID NO: 40118 - RNA, 21 nt, RNAi
cucaccacuggugccugacuu

SEQ ID NO: 40119 - RNA, 21 nt, RNAi
uugaguggugaccacggacug

SEQ ID NO: 40120 - DNA, 21 bp, homo sapiens
tagctggaatcatcctctgct

SEQ ID NO: 40121 - RNA, 21 nt, RNAi
gcuggaaucauccucugcuuu

SEQ ID NO: 40122 - RNA, 21 nt, RNAi
uucgaccuuaguaggagacga

SEQ ID NO: 40123 - DNA, 21 bp, homo sapiens
tactacgatgcctaccaagcc

SEQ ID NO: 40124 - RNA, 21 nt, RNAi
cuacgaugccuaccaagccuu

SEQ ID NO: 40125 - RNA, 21 nt, RNAi
uugaugcuacggaugguucgg

SEQ ID NO: 40126 - DNA, 21 bp, homo sapiens
aaagatctcagagtaaagaag

SEQ ID NO: 40127 - RNA, 21 nt, RNAi
agaucucagaguaaagaaguu

SEQ ID NO: 40128 - RNA, 21 nt, RNAi
uuucuagagucucauuucuuc

SEQ ID NO: 40129 - DNA, 21 bp, homo sapiens
aagatctcagagtaaagaaga

SEQ ID NO: 40130 - RNA, 21 nt, RNAi
gaucucagaguaaagaagauu

SEQ ID NO: 40131 - RNA, 21 nt, RNAi
uucuagagucucauuucuucu

SEQ ID NO: 40132 - DNA, 21 bp, homo sapiens
aagttgatttccatggaaacc

SEQ ID NO: 40133 - RNA, 21 nt, RNAi
guugauuuccauggaaaccuu

SEQ ID NO: 40134 - RNA, 21 nt, RNAi
uucaacuaaagguaccuuugg

SEQ ID NO: 40135 - DNA, 21 bp, homo sapiens
aaacctcgtcatcctctgatg

SEQ ID NO: 40136 - RNA, 21 nt, RNAi
accucgucauccucugauguu

SEQ ID NO: 40137 - RNA, 21 nt, RNAi
uuuggagcaguaggagacuac

SEQ ID NO: 40138 - DNA, 21 bp, homo sapiens
aacctcgtcatcctctgatga

SEQ ID NO: 40139 - RNA, 21 nt, RNAi
ccucgucauccucugaugauu

SEQ ID NO: 40140 - RNA, 21 nt, RNAi
uuggagcaguaggagacuacu

SEQ ID NO: 40141 - DNA, 21 bp, homo sapiens
aaacacgaggctgcagtcagt

SEQ ID NO: 40142 - RNA, 21 nt, RNAi
acacgaggcugcagucaguuu

SEQ ID NO: 40143 - RNA, 21 nt, RNAi
uuugugcuccgacgucaguca

SEQ ID NO: 40144 - DNA, 21 bp, homo sapiens
aacacgaggctgcagtcagtt

SEQ ID NO: 40145 - RNA, 21 nt, RNAi
cacgaggcugcagucaguuuu

SEQ ID NO: 40146 - RNA, 21 nt, RNAi
uugugcuccgacgucagucaa

SEQ ID NO: 40147 - DNA, 21 bp, homo sapiens
aagtttccagcgcggagtacc

SEQ ID NO: 40148 - RNA, 21 nt, RNAi
guuuccagcgcggaguaccuu

SEQ ID NO: 40149 - RNA, 21 nt, RNAi
uucaaaggucgcgccucaugg

SEQ ID NO: 40150 - DNA, 21 bp, homo sapiens
aattctgtgactgattccaac

SEQ ID NO: 40151 - RNA, 21 nt, RNAi
uucugugacugauuccaacuu

SEQ ID NO: 40152 - RNA, 21 nt, RNAi
uuaagacacugacuaagguug

SEQ ID NO: 40153 - DNA, 21 bp, homo sapiens
aactccgattcagaagatgaa

SEQ ID NO: 40154 - RNA, 21 nt, RNAi
cuccgauucagaagaugaauu

SEQ ID NO: 40155 - RNA, 21 nt, RNAi
uugaggcuaagucuucuacuu

SEQ ID NO: 40156 - DNA, 21 bp, homo sapiens
aaacaaagcaatgcttgcaaa

SEQ ID NO: 40157 - RNA, 21 nt, RNAi
acaaagcaaugcuugcaaauu

SEQ ID NO: 40158 - RNA, 21 nt, RNAi
uuuguuucguuacgaacguuu

SEQ ID NO: 40159 - DNA, 21 bp, homo sapiens
aatcaaggagaccgcgaaggc

SEQ ID NO: 40160 - RNA, 21 nt, RNAi
ucaaggagaccgcgaaggcuu

SEQ ID NO: 40161 - RNA, 21 nt, RNAi
uuaguuccucuggcgcuuccg

SEQ ID NO: 40162 - DNA, 21 bp, homo sapiens
aaggagaccgcgaaggcgtac

SEQ ID NO: 40163 - RNA, 21 nt, RNAi
ggagaccgcgaaggcguacuu

SEQ ID NO: 40164 - RNA, 21 nt, RNAi
uuccucuggcgcuuccgcaug

SEQ ID NO: 40165 - DNA, 21 bp, homo sapiens
aacggagagctcgtcctctta

SEQ ID NO: 40166 - RNA, 21 nt, RNAi
cggagagcucguccucuuauu

SEQ ID NO: 40167 - RNA, 21 nt, RNAi
uugccucucgagcaggagaau

SEQ ID NO: 40168 - DNA, 21 bp, homo sapiens
aagaggataagtacatgttgg

SEQ ID NO: 40169 - RNA, 21 nt, RNAi
gaggauaaguacauguugguu

SEQ ID NO: 40170 - RNA, 21 nt, RNAi
uucuccuauucauguacaacc

SEQ ID NO: 40171 - DNA, 21 bp, homo sapiens
aagtacatgttggtgagaaag

SEQ ID NO: 40172 - RNA, 21 nt, RNAi
guacauguuggugagaaaguu

SEQ ID NO: 40173 - RNA, 21 nt, RNAi
uucauguacaaccacucuuuc

SEQ ID NO: 40174 - DNA, 21 bp, homo sapiens
aaagaggaagaccgtggatgg

SEQ ID NO: 40175 - RNA, 21 nt, RNAi
agaggaagaccguggaugguu

SEQ ID NO: 40176 - RNA, 21 nt, RNAi
uuucuccuucuggcaccuacc

SEQ ID NO: 40177 - DNA, 21 bp, homo sapiens
aagaggaagaccgtggatggc

SEQ ID NO: 40178 - RNA, 21 nt, RNAi
gaggaagaccguggauggcuu

SEQ ID NO: 40179 - RNA, 21 nt, RNAi
uucuccuucuggcaccuaccg

SEQ ID NO: 40180 - DNA, 21 bp, homo sapiens
aagaccgtggatggctacatg

SEQ ID NO: 40181 - RNA, 21 nt, RNAi
gaccguggauggcuacauguu

SEQ ID NO: 40182 - RNA, 21 nt, RNAi
uucuggcaccuaccgauguac

SEQ ID NO: 40183 - DNA, 21 bp, homo sapiens
aagccgtcgctccagatcatc

SEQ ID NO: 40184 - RNA, 21 nt, RNAi
gccgucgcuccagaucaucuu

SEQ ID NO: 40185 - RNA, 21 nt, RNAi
uucggcagcgaggucuaguag

SEQ ID NO: 40186 - DNA, 21 bp, homo sapiens
aagaaattacagaggaggagt

SEQ ID NO: 40187 - RNA, 21 nt, RNAi
gaaauuacagaggaggaguuu

SEQ ID NO: 40188 - RNA, 21 nt, RNAi
uucuuuaaugucuccuccuca

SEQ ID NO: 40189 - DNA, 21 bp, homo sapiens
aaattacagaggaggagttgg

SEQ ID NO: 40190 - RNA, 21 nt, RNAi
auuacagaggaggaguugguu

SEQ ID NO: 40191 - RNA, 21 nt, RNAi
uuuaaugucuccuccucaacc

SEQ ID NO: 40192 - DNA, 21 bp, homo sapiens
aattacagaggaggagttgga

SEQ ID NO: 40193 - RNA, 21 nt, RNAi
uuacagaggaggaguuggauu

SEQ ID NO: 40194 - RNA, 21 nt, RNAi
uuaaugucuccuccucaaccu

SEQ ID NO: 40195 - DNA, 21 bp, homo sapiens
aacgtctgcagcaattctcga

SEQ ID NO: 40196 - RNA, 21 nt, RNAi
cgucugcagcaauucucgauu

SEQ ID NO: 40197 - RNA, 21 nt, RNAi
uugcagacgucguuaagagcu

SEQ ID NO: 40198 - DNA, 21 bp, homo sapiens
aagatatataaccgttcactg

SEQ ID NO: 40199 - RNA, 21 nt, RNAi
gauauauaaccguucacuguu

SEQ ID NO: 40200 - RNA, 21 nt, RNAi
uucuauauauuggcaagugac

SEQ ID NO: 40201 - DNA, 21 bp, homo sapiens
aatgccgtcagaagactattg

SEQ ID NO: 40202 - RNA, 21 nt, RNAi
ugccgucagaagacuauuguu

SEQ ID NO: 40203 - RNA, 21 nt, RNAi
uuacggcagucuucugauaac

SEQ ID NO: 40204 - DNA, 21 bp, homo sapiens
aaaccgttatggtgaagaggt

SEQ ID NO: 40205 - RNA, 21 nt, RNAi
accguuauggugaagagguuu

SEQ ID NO: 40206 - RNA, 21 nt, RNAi
uuuggcaauaccacuucucca

SEQ ID NO: 40207 - DNA, 21 bp, homo sapiens
aaccgttatggtgaagaggtc

SEQ ID NO: 40208 - RNA, 21 nt, RNAi
ccguuauggugaagaggucuu

SEQ ID NO: 40209 - RNA, 21 nt, RNAi
uuggcaauaccacuucuccag

SEQ ID NO: 40210 - DNA, 21 bp, homo sapiens
aatctgcaactgcagtttctg

SEQ ID NO: 40211 - RNA, 21 nt, RNAi
ucugcaacugcaguuucuguu

SEQ ID NO: 40212 - RNA, 21 nt, RNAi
uuagacguugacgucaaagac

SEQ ID NO: 40213 - DNA, 21 bp, homo sapiens
aactgcagtttctgccggcag

SEQ ID NO: 40214 - RNA, 21 nt, RNAi
cugcaguuucugccggcaguu

SEQ ID NO: 40215 - RNA, 21 nt, RNAi
uugacgucaaagacggccguc

SEQ ID NO: 40216 - DNA, 21 bp, homo sapiens
aatgtgcatgcctacttgaaa

SEQ ID NO: 40217 - RNA, 21 nt, RNAi
ugugcaugccuacuugaaauu

SEQ ID NO: 40218 - RNA, 21 nt, RNAi
uuacacguacggaugaacuuu

SEQ ID NO: 40219 - DNA, 21 bp, homo sapiens
aaagcctgaaacaggaatttg

SEQ ID NO: 40220 - RNA, 21 nt, RNAi
agccugaaacaggaauuuguu

SEQ ID NO: 40221 - RNA, 21 nt, RNAi
uuucggacuuuguccuuaaac

SEQ ID NO: 40222 - DNA, 21 bp, homo sapiens
aagcctgaaacaggaatttga

SEQ ID NO: 40223 - RNA, 21 nt, RNAi
gccugaaacaggaauuugauu

SEQ ID NO: 40224 - RNA, 21 nt, RNAi
uucggacuuuguccuuaaacu

SEQ ID NO: 40225 - DNA, 21 bp, homo sapiens
aacaggaatttgaaatgcaag

SEQ ID NO: 40226 - RNA, 21 nt, RNAi
caggaauuugaaaugcaaguu

SEQ ID NO: 40227 - RNA, 21 nt, RNAi
uuguccuuaaacuuuacguuc

SEQ ID NO: 40228 - DNA, 21 bp, homo sapiens
aaatgcaagcataatatctgg

SEQ ID NO: 40229 - RNA, 21 nt, RNAi
augcaagcauaauaucugguu

SEQ ID NO: 40230 - RNA, 21 nt, RNAi
uuuacguucguauuauagacc

SEQ ID NO: 40231 - DNA, 21 bp, homo sapiens
aatgcaagcataatatctgga

SEQ ID NO: 40232 - RNA, 21 nt, RNAi
ugcaagcauaauaucuggauu

SEQ ID NO: 40233 - RNA, 21 nt, RNAi
uuacguucguauuauagaccu

SEQ ID NO: 40234 - DNA, 21 bp, homo sapiens
aaatttgctgcctgccttcta

SEQ ID NO: 40235 - RNA, 21 nt, RNAi
auuugcugccugccuucuauu

SEQ ID NO: 40236 - RNA, 21 nt, RNAi
uuuaaacgacggacggaagau

SEQ ID NO: 40237 - DNA, 21 bp, homo sapiens
aatttgctgcctgccttctac

SEQ ID NO: 40238 - RNA, 21 nt, RNAi
uuugcugccugccuucuacuu

SEQ ID NO: 40239 - RNA, 21 nt, RNAi
uuaaacgacggacggaagaug

SEQ ID NO: 40240 - DNA, 21 bp, homo sapiens
aaatcttgatgatcagcctgt

SEQ ID NO: 40241 - RNA, 21 nt, RNAi
aucuugaugaucagccuguuu

SEQ ID NO: 40242 - RNA, 21 nt, RNAi
uuuagaacuacuagucggaca

SEQ ID NO: 40243 - DNA, 21 bp, homo sapiens
aatcttgatgatcagcctgtt

SEQ ID NO: 40244 - RNA, 21 nt, RNAi
ucuugaugaucagccuguuuu

SEQ ID NO: 40245 - RNA, 21 nt, RNAi
uuagaacuacuagucggacaa

SEQ ID NO: 40246 - DNA, 21 bp, homo sapiens
aagttaatcttagcagacatg

SEQ ID NO: 40247 - RNA, 21 nt, RNAi
guuaaucuuagcagacauguu

SEQ ID NO: 40248 - RNA, 21 nt, RNAi
uucaauuagaaucgucuguac

SEQ ID NO: 40249 - DNA, 21 bp, homo sapiens
aatcttagcagacatgtgttt

SEQ ID NO: 40250 - RNA, 21 nt, RNAi
ucuuagcagacauguguuuuu

SEQ ID NO: 40251 - RNA, 21 nt, RNAi
uuagaaucgucuguacacaaa

SEQ ID NO: 40252 - DNA, 21 bp, homo sapiens
aaggtatattgctagttacac

SEQ ID NO: 40253 - RNA, 21 nt, RNAi
gguauauugcuaguuacacuu

SEQ ID NO: 40254 - RNA, 21 nt, RNAi
uuccauauaacgaucaaugug

SEQ ID NO: 40255 - DNA, 21 bp, homo sapiens
aatgctcctctccaaccgctt

SEQ ID NO: 40256 - RNA, 21 nt, RNAi
ugcuccucuccaaccgcuuuu

SEQ ID NO: 40257 - RNA, 21 nt, RNAi
uuacgaggagagguuggcgaa

SEQ ID NO: 40258 - DNA, 21 bp, homo sapiens
aaccgcttagtttctgaattt

SEQ ID NO: 40259 - RNA, 21 nt, RNAi
ccgcuuaguuucugaauuuuu

SEQ ID NO: 40260 - RNA, 21 nt, RNAi
uuggcgaaucaaagacuuaaa

SEQ ID NO: 40261 - DNA, 21 bp, homo sapiens
aaacctaagcacttggaaaca

SEQ ID NO: 40262 - RNA, 21 nt, RNAi
accuaagcacuuggaaacauu

SEQ ID NO: 40263 - RNA, 21 nt, RNAi
uuuggauucgugaaccuuugu

SEQ ID NO: 40264 - DNA, 21 bp, homo sapiens
aacctaagcacttggaaacac

SEQ ID NO: 40265 - RNA, 21 nt, RNAi
ccuaagcacuuggaaacacuu

SEQ ID NO: 40266 - RNA, 21 nt, RNAi
uuggauucgugaaccuuugug

SEQ ID NO: 40267 - DNA, 21 bp, homo sapiens
aagcacttggaaacacaataa

SEQ ID NO: 40268 - RNA, 21 nt, RNAi
gcacuuggaaacacaauaauu

SEQ ID NO: 40269 - RNA, 21 nt, RNAi
uucgugaaccuuuguguuauu

SEQ ID NO: 40270 - DNA, 21 bp, homo sapiens
aatttcagagaagagccttct

SEQ ID NO: 40271 - RNA, 21 nt, RNAi
uuucagagaagagccuucuuu

SEQ ID NO: 40272 - RNA, 21 nt, RNAi
uuaaagucucuucucggaaga

SEQ ID NO: 40273 - DNA, 21 bp, homo sapiens
aagagccttctaacttgttta

SEQ ID NO: 40274 - RNA, 21 nt, RNAi
gagccuucuaacuuguuuauu

SEQ ID NO: 40275 - RNA, 21 nt, RNAi
uucucggaagauugaacaaau

SEQ ID NO: 40276 - DNA, 21 bp, homo sapiens
aaacgagtatgatttagcact

SEQ ID NO: 40277 - RNA, 21 nt, RNAi
acgaguaugauuuagcacuuu

SEQ ID NO: 40278 - RNA, 21 nt, RNAi
uuugcucauacuaaaucguga

SEQ ID NO: 40279 - DNA, 21 bp, homo sapiens
aacgagtatgatttagcactc

SEQ ID NO: 40280 - RNA, 21 nt, RNAi
cgaguaugauuuagcacucuu

SEQ ID NO: 40281 - RNA, 21 nt, RNAi
uugcucauacuaaaucgugag

SEQ ID NO: 40282 - DNA, 21 bp, homo sapiens
aagttgttgtcacagttgaga

SEQ ID NO: 40283 - RNA, 21 nt, RNAi
guuguugucacaguugagauu

SEQ ID NO: 40284 - RNA, 21 nt, RNAi
uucaacaacagugucaacucu

SEQ ID NO: 40285 - DNA, 21 bp, homo sapiens
aagtggtgcgtccagcttaca

SEQ ID NO: 40286 - RNA, 21 nt, RNAi
guggugcguccagcuuacauu

SEQ ID NO: 40287 - RNA, 21 nt, RNAi
uucaccacgcaggucgaaugu

SEQ ID NO: 40288 - DNA, 21 bp, homo sapiens
aataatgatggaagagctatc

SEQ ID NO: 40289 - RNA, 21 nt, RNAi
uaaugauggaagagcuaucuu

SEQ ID NO: 40290 - RNA, 21 nt, RNAi
uuauuacuaccuucucgauag

SEQ ID NO: 40291 - DNA, 21 bp, homo sapiens
aatgatggaagagctatctgg

SEQ ID NO: 40292 - RNA, 21 nt, RNAi
ugauggaagagcuaucugguu

SEQ ID NO: 40293 - RNA, 21 nt, RNAi
uuacuaccuucucgauagacc

SEQ ID NO: 40294 - DNA, 21 bp, homo sapiens
aagagctatctggagattatg

SEQ ID NO: 40295 - RNA, 21 nt, RNAi
gagcuaucuggagauuauguu

SEQ ID NO: 40296 - RNA, 21 nt, RNAi
uucucgauagaccucuaauac

SEQ ID NO: 40297 - DNA, 21 bp, homo sapiens
aaactagtctgtggttctttg

SEQ ID NO: 40298 - RNA, 21 nt, RNAi
acuagucugugguucuuuguu

SEQ ID NO: 40299 - RNA, 21 nt, RNAi
uuugaucagacaccaagaaac

SEQ ID NO: 40300 - DNA, 21 bp, homo sapiens
aactagtctgtggttctttgc

SEQ ID NO: 40301 - RNA, 21 nt, RNAi
cuagucugugguucuuugcuu

SEQ ID NO: 40302 - RNA, 21 nt, RNAi
uugaucagacaccaagaaacg

SEQ ID NO: 40303 - DNA, 21 bp, homo sapiens
aatttataaaccaggcacaag

SEQ ID NO: 40304 - RNA, 21 nt, RNAi
uuuauaaaccaggcacaaguu

SEQ ID NO: 40305 - RNA, 21 nt, RNAi
uuaaauauuugguccguguuc

SEQ ID NO: 40306 - DNA, 21 bp, homo sapiens
aaaccaggcacaaggttcaag

SEQ ID NO: 40307 - RNA, 21 nt, RNAi
accaggcacaagguucaaguu

SEQ ID NO: 40308 - RNA, 21 nt, RNAi
uuugguccguguuccaaguuc

SEQ ID NO: 40309 - DNA, 21 bp, homo sapiens
aaccaggcacaaggttcaagt

SEQ ID NO: 40310 - RNA, 21 nt, RNAi
ccaggcacaagguucaaguuu

SEQ ID NO: 40311 - RNA, 21 nt, RNAi
uugguccguguuccaaguuca

SEQ ID NO: 40312 - DNA, 21 bp, homo sapiens
aacctgacatctctgccagtc

SEQ ID NO: 40313 - RNA, 21 nt, RNAi
ccugacaucucugccagucuu

SEQ ID NO: 40314 - RNA, 21 nt, RNAi
uuggacuguagagacggucag

SEQ ID NO: 40315 - DNA, 21 bp, homo sapiens
aatcaaggtatttggtagagg

SEQ ID NO: 40316 - RNA, 21 nt, RNAi
ucaagguauuugguagagguu

SEQ ID NO: 40317 - RNA, 21 nt, RNAi
uuaguuccauaaaccaucucc

SEQ ID NO: 40318 - DNA, 21 bp, homo sapiens
aaggtatttggtagaggtgga

SEQ ID NO: 40319 - RNA, 21 nt, RNAi
gguauuugguagagguggauu

SEQ ID NO: 40320 - RNA, 21 nt, RNAi
uuccauaaaccaucuccaccu

SEQ ID NO: 40321 - DNA, 21 bp, homo sapiens
aatctaagtgtttgtatgtcc

SEQ ID NO: 40322 - RNA, 21 nt, RNAi
ucuaaguguuuguauguccuu

SEQ ID NO: 40323 - RNA, 21 nt, RNAi
uuagauucacaaacauacagg

SEQ ID NO: 40324 - DNA, 21 bp, homo sapiens
aaaccattgctgtgccattca

SEQ ID NO: 40325 - RNA, 21 nt, RNAi
accauugcugugccauucauu

SEQ ID NO: 40326 - RNA, 21 nt, RNAi
uuugguaacgacacgguaagu

SEQ ID NO: 40327 - DNA, 21 bp, homo sapiens
aaccattgctgtgccattcaa

SEQ ID NO: 40328 - RNA, 21 nt, RNAi
ccauugcugugccauucaauu

SEQ ID NO: 40329 - RNA, 21 nt, RNAi
uugguaacgacacgguaaguu

SEQ ID NO: 40330 - DNA, 21 bp, homo sapiens
aattggaccttgaatcgataa

SEQ ID NO: 40331 - RNA, 21 nt, RNAi
uuggaccuugaaucgauaauu

SEQ ID NO: 40332 - RNA, 21 nt, RNAi
uuaaccuggaacuuagcuauu

SEQ ID NO: 40333 - DNA, 21 bp, homo sapiens
cagaaagatctcagagtaaag

SEQ ID NO: 40334 - RNA, 21 nt, RNAi
gaaagaucucagaguaaaguu

SEQ ID NO: 40335 - RNA, 21 nt, RNAi
uucuuucuagagucucauuuc

SEQ ID NO: 40336 - DNA, 21 bp, homo sapiens
cagatatgtgaagttgatttc

SEQ ID NO: 40337 - RNA, 21 nt, RNAi
gauaugugaaguugauuucuu

SEQ ID NO: 40338 - RNA, 21 nt, RNAi
uucuauacacuucaacuaaag

SEQ ID NO: 40339 - DNA, 21 bp, homo sapiens
catggaaacctcgtcatcctc

SEQ ID NO: 40340 - RNA, 21 nt, RNAi
uggaaaccucgucauccucuu

SEQ ID NO: 40341 - RNA, 21 nt, RNAi
uuaccuuuggagcaguaggag

SEQ ID NO: 40342 - DNA, 21 bp, homo sapiens
catcctctgatgacagttgtg

SEQ ID NO: 40343 - RNA, 21 nt, RNAi
uccucugaugacaguuguguu

SEQ ID NO: 40344 - RNA, 21 nt, RNAi
uuaggagacuacugucaacac

SEQ ID NO: 40345 - DNA, 21 bp, homo sapiens
cagttgtgacagctttgcttc

SEQ ID NO: 40346 - RNA, 21 nt, RNAi
guugugacagcuuugcuucuu

SEQ ID NO: 40347 - RNA, 21 nt, RNAi
uucaacacugucgaaacgaag

SEQ ID NO: 40348 - DNA, 21 bp, homo sapiens
cagctttgcttctgataattt

SEQ ID NO: 40349 - RNA, 21 nt, RNAi
gcuuugcuucugauaauuuuu

SEQ ID NO: 40350 - RNA, 21 nt, RNAi
uucgaaacgaagacuauuaaa

SEQ ID NO: 40351 - DNA, 21 bp, homo sapiens
caaacacgaggctgcagtcag

SEQ ID NO: 40352 - RNA, 21 nt, RNAi
aacacgaggcugcagucaguu

SEQ ID NO: 40353 - RNA, 21 nt, RNAi
uuuugugcuccgacgucaguc

SEQ ID NO: 40354 - DNA, 21 bp, homo sapiens
cacgaggctgcagtcagttcg

SEQ ID NO: 40355 - RNA, 21 nt, RNAi
cgaggcugcagucaguucguu

SEQ ID NO: 40356 - RNA, 21 nt, RNAi
uugcuccgacgucagucaagc

SEQ ID NO: 40357 - DNA, 21 bp, homo sapiens
cagtgcaggcactctggacct

SEQ ID NO: 40358 - RNA, 21 nt, RNAi
gugcaggcacucuggaccuuu

SEQ ID NO: 40359 - RNA, 21 nt, RNAi
uucacguccgugagaccugga

SEQ ID NO: 40360 - DNA, 21 bp, homo sapiens
caggcactctggacctctcag

SEQ ID NO: 40361 - RNA, 21 nt, RNAi
ggcacucuggaccucucaguu

SEQ ID NO: 40362 - RNA, 21 nt, RNAi
uuccgugagaccuggagaguc

SEQ ID NO: 40363 - DNA, 21 bp, homo sapiens
cagagaattctgtgactgatt

SEQ ID NO: 40364 - RNA, 21 nt, RNAi
gagaauucugugacugauuuu

SEQ ID NO: 40365 - RNA, 21 nt, RNAi
uucucuuaagacacugacuaa

SEQ ID NO: 40366 - DNA, 21 bp, homo sapiens
caactccgattcagaagatga

SEQ ID NO: 40367 - RNA, 21 nt, RNAi
acuccgauucagaagaugauu

SEQ ID NO: 40368 - RNA, 21 nt, RNAi
uuugaggcuaagucuucuacu

SEQ ID NO: 40369 - DNA, 21 bp, homo sapiens
cagaagatgaaagtggaatga

SEQ ID NO: 40370 - RNA, 21 nt, RNAi
gaagaugaaaguggaaugauu

SEQ ID NO: 40371 - RNA, 21 nt, RNAi
uucuucuacuuucaccuuacu

SEQ ID NO: 40372 - DNA, 21 bp, homo sapiens
catgtctgaattagaaagctt

SEQ ID NO: 40373 - RNA, 21 nt, RNAi
ugucugaauuagaaagcuuuu

SEQ ID NO: 40374 - RNA, 21 nt, RNAi
uuacagacuuaaucuuucgaa

SEQ ID NO: 40375 - DNA, 21 bp, homo sapiens
caggctccgactcacaatcaa

SEQ ID NO: 40376 - RNA, 21 nt, RNAi
ggcuccgacucacaaucaauu

SEQ ID NO: 40377 - RNA, 21 nt, RNAi
uuccgaggcugaguguuaguu

SEQ ID NO: 40378 - DNA, 21 bp, homo sapiens
cacaatcaaggagaccgcgaa

SEQ ID NO: 40379 - RNA, 21 nt, RNAi
caaucaaggagaccgcgaauu

SEQ ID NO: 40380 - RNA, 21 nt, RNAi
uuguuaguuccucuggcgcuu

SEQ ID NO: 40381 - DNA, 21 bp, homo sapiens
caatcaaggagaccgcgaagg

SEQ ID NO: 40382 - RNA, 21 nt, RNAi
aucaaggagaccgcgaagguu

SEQ ID NO: 40383 - RNA, 21 nt, RNAi
uuuaguuccucuggcgcuucc

SEQ ID NO: 40384 - DNA, 21 bp, homo sapiens
caaggagaccgcgaaggcgta

SEQ ID NO: 40385 - RNA, 21 nt, RNAi
aggagaccgcgaaggcguauu

SEQ ID NO: 40386 - RNA, 21 nt, RNAi
uuuccucuggcgcuuccgcau

SEQ ID NO: 40387 - DNA, 21 bp, homo sapiens
catggaggaggaggaggaaga

SEQ ID NO: 40388 - RNA, 21 nt, RNAi
uggaggaggaggaggaagauu

SEQ ID NO: 40389 - RNA, 21 nt, RNAi
uuaccuccuccuccuccuucu

SEQ ID NO: 40390 - DNA, 21 bp, homo sapiens
catgttggtgagaaagaggaa

SEQ ID NO: 40391 - RNA, 21 nt, RNAi
uguuggugagaaagaggaauu

SEQ ID NO: 40392 - RNA, 21 nt, RNAi
uuacaaccacucuuucuccuu

SEQ ID NO: 40393 - DNA, 21 bp, homo sapiens
catgaatgaagatgacctgcc

SEQ ID NO: 40394 - RNA, 21 nt, RNAi
ugaaugaagaugaccugccuu

SEQ ID NO: 40395 - RNA, 21 nt, RNAi
uuacuuacuucuacuggacgg

SEQ ID NO: 40396 - DNA, 21 bp, homo sapiens
cagaagccgtcgctccagatc

SEQ ID NO: 40397 - RNA, 21 nt, RNAi
gaagccgucgcuccagaucuu

SEQ ID NO: 40398 - RNA, 21 nt, RNAi
uucuucggcagcgaggucuag

SEQ ID NO: 40399 - DNA, 21 bp, homo sapiens
cagtggaagaaattacagagg

SEQ ID NO: 40400 - RNA, 21 nt, RNAi
guggaagaaauuacagagguu

SEQ ID NO: 40401 - RNA, 21 nt, RNAi
uucaccuucuuuaaugucucc

SEQ ID NO: 40402 - DNA, 21 bp, homo sapiens
cagaggaggagttggagaacg

SEQ ID NO: 40403 - RNA, 21 nt, RNAi
gaggaggaguuggagaacguu

SEQ ID NO: 40404 - RNA, 21 nt, RNAi
uucuccuccucaaccucuugc

SEQ ID NO: 40405 - DNA, 21 bp, homo sapiens
cagcaattctcgagagaagat

SEQ ID NO: 40406 - RNA, 21 nt, RNAi
gcaauucucgagagaagauuu

SEQ ID NO: 40407 - RNA, 21 nt, RNAi
uucguuaagagcucucuucua

SEQ ID NO: 40408 - DNA, 21 bp, homo sapiens
caattctcgagagaagatata

SEQ ID NO: 40409 - RNA, 21 nt, RNAi
auucucgagagaagauauauu

SEQ ID NO: 40410 - RNA, 21 nt, RNAi
uuuaagagcucucuucuauau

SEQ ID NO: 40411 - DNA, 21 bp, homo sapiens
catcaatgccgtcagaagact

SEQ ID NO: 40412 - RNA, 21 nt, RNAi
ucaaugccgucagaagacuuu

SEQ ID NO: 40413 - RNA, 21 nt, RNAi
uuaguuacggcagucuucuga

SEQ ID NO: 40414 - DNA, 21 bp, homo sapiens
caatgccgtcagaagactatt

SEQ ID NO: 40415 - RNA, 21 nt, RNAi
augccgucagaagacuauuuu

SEQ ID NO: 40416 - RNA, 21 nt, RNAi
uuuacggcagucuucugauaa

SEQ ID NO: 40417 - DNA, 21 bp, homo sapiens
cagaagactattgataccaaa

SEQ ID NO: 40418 - RNA, 21 nt, RNAi
gaagacuauugauaccaaauu

SEQ ID NO: 40419 - RNA, 21 nt, RNAi
uucuucugauaacuaugguuu

SEQ ID NO: 40420 - DNA, 21 bp, homo sapiens
caactgcagtttctgccggca

SEQ ID NO: 40421 - RNA, 21 nt, RNAi
acugcaguuucugccggcauu

SEQ ID NO: 40422 - RNA, 21 nt, RNAi
uuugacgucaaagacggccgu

SEQ ID NO: 40423 - DNA, 21 bp, homo sapiens
cagtttctgccggcagcgaga

SEQ ID NO: 40424 - RNA, 21 nt, RNAi
guuucugccggcagcgagauu

SEQ ID NO: 40425 - RNA, 21 nt, RNAi
uucaaagacggccgucgcucu

SEQ ID NO: 40426 - DNA, 21 bp, homo sapiens
caggaatttgaaatgcaagca

SEQ ID NO: 40427 - RNA, 21 nt, RNAi
ggaauuugaaaugcaagcauu

SEQ ID NO: 40428 - RNA, 21 nt, RNAi
uuccuuaaacuuuacguucgu

SEQ ID NO: 40429 - DNA, 21 bp, homo sapiens
cagcctgtttcataagaaact

SEQ ID NO: 40430 - RNA, 21 nt, RNAi
gccuguuucauaagaaacuuu

SEQ ID NO: 40431 - RNA, 21 nt, RNAi
uucggacaaaguauucuuuga

SEQ ID NO: 40432 - DNA, 21 bp, homo sapiens
cataagaaactccaatcaagt

SEQ ID NO: 40433 - RNA, 21 nt, RNAi
uaagaaacuccaaucaaguuu

SEQ ID NO: 40434 - RNA, 21 nt, RNAi
uuauucuuugagguuaguuca

SEQ ID NO: 40435 - DNA, 21 bp, homo sapiens
caatcaagttaatcttagcag

SEQ ID NO: 40436 - RNA, 21 nt, RNAi
aucaaguuaaucuuagcaguu

SEQ ID NO: 40437 - RNA, 21 nt, RNAi
uuuaguucaauuagaaucguc

SEQ ID NO: 40438 - DNA, 21 bp, homo sapiens
caagttaatcttagcagacat

SEQ ID NO: 40439 - RNA, 21 nt, RNAi
aguuaaucuuagcagacauuu

SEQ ID NO: 40440 - RNA, 21 nt, RNAi
uuucaauuagaaucgucugua

SEQ ID NO: 40441 - DNA, 21 bp, homo sapiens
cagacatgtgtttctggagca

SEQ ID NO: 40442 - RNA, 21 nt, RNAi
gacauguguuucuggagcauu

SEQ ID NO: 40443 - RNA, 21 nt, RNAi
uucuguacacaaagaccucgu

SEQ ID NO: 40444 - DNA, 21 bp, homo sapiens
catgtgtttctggagcatcac

SEQ ID NO: 40445 - RNA, 21 nt, RNAi
uguguuucuggagcaucacuu

SEQ ID NO: 40446 - RNA, 21 nt, RNAi
uuacacaaagaccucguagug

SEQ ID NO: 40447 - DNA, 21 bp, homo sapiens
catcacagaaggtatattgct

SEQ ID NO: 40448 - RNA, 21 nt, RNAi
ucacagaagguauauugcuuu

SEQ ID NO: 40449 - RNA, 21 nt, RNAi
uuagugucuuccauauaacga

SEQ ID NO: 40450 - DNA, 21 bp, homo sapiens
cacagaaggtatattgctagt

SEQ ID NO: 40451 - RNA, 21 nt, RNAi
cagaagguauauugcuaguuu

SEQ ID NO: 40452 - RNA, 21 nt, RNAi
uugucuuccauauaacgauca

SEQ ID NO: 40453 - DNA, 21 bp, homo sapiens
cagaaggtatattgctagtta

SEQ ID NO: 40454 - RNA, 21 nt, RNAi
gaagguauauugcuaguuauu

SEQ ID NO: 40455 - RNA, 21 nt, RNAi
uucuuccauauaacgaucaau

SEQ ID NO: 40456 - DNA, 21 bp, homo sapiens
caatgctcctctccaaccgct

SEQ ID NO: 40457 - RNA, 21 nt, RNAi
augcuccucuccaaccgcuuu

SEQ ID NO: 40458 - RNA, 21 nt, RNAi
uuuacgaggagagguuggcga

SEQ ID NO: 40459 - DNA, 21 bp, homo sapiens
caaccgcttagtttctgaatt

SEQ ID NO: 40460 - RNA, 21 nt, RNAi
accgcuuaguuucugaauuuu

SEQ ID NO: 40461 - RNA, 21 nt, RNAi
uuuggcgaaucaaagacuuaa

SEQ ID NO: 40462 - DNA, 21 bp, homo sapiens
cacttggaaacacaataatag

SEQ ID NO: 40463 - RNA, 21 nt, RNAi
cuuggaaacacaauaauaguu

SEQ ID NO: 40464 - RNA, 21 nt, RNAi
uugaaccuuuguguuauuauc

SEQ ID NO: 40465 - DNA, 21 bp, homo sapiens
cagagaagagccttctaactt

SEQ ID NO: 40466 - RNA, 21 nt, RNAi
gagaagagccuucuaacuuuu

SEQ ID NO: 40467 - RNA, 21 nt, RNAi
uucucuucucggaagauugaa

SEQ ID NO: 40468 - DNA, 21 bp, homo sapiens
cagattgatgtctctcaatcc

SEQ ID NO: 40469 - RNA, 21 nt, RNAi
gauugaugucucucaauccuu

SEQ ID NO: 40470 - RNA, 21 nt, RNAi
uucuaacuacagagaguuagg

SEQ ID NO: 40471 - DNA, 21 bp, homo sapiens
catgtattgcgcttatgttac

SEQ ID NO: 40472 - RNA, 21 nt, RNAi
uguauugcgcuuauguuacuu

SEQ ID NO: 40473 - RNA, 21 nt, RNAi
uuacauaacgcgaauacaaug

SEQ ID NO: 40474 - DNA, 21 bp, homo sapiens
caagttgttgtcacagttgag

SEQ ID NO: 40475 - RNA, 21 nt, RNAi
aguuguugucacaguugaguu

SEQ ID NO: 40476 - RNA, 21 nt, RNAi
uuucaacaacagugucaacuc

SEQ ID NO: 40477 - DNA, 21 bp, homo sapiens
cacagttgagacttaatttct

SEQ ID NO: 40478 - RNA, 21 nt, RNAi
caguugagacuuaauuucuuu

SEQ ID NO: 40479 - RNA, 21 nt, RNAi
uugucaacucugaauuaaaga

SEQ ID NO: 40480 - DNA, 21 bp, homo sapiens
cagttgagacttaatttctcc

SEQ ID NO: 40481 - RNA, 21 nt, RNAi
guugagacuuaauuucuccuu

SEQ ID NO: 40482 - RNA, 21 nt, RNAi
uucaacucugaauuaaagagg

SEQ ID NO: 40483 - DNA, 21 bp, homo sapiens
cagcttacacgatcataattc

SEQ ID NO: 40484 - RNA, 21 nt, RNAi
gcuuacacgaucauaauucuu

SEQ ID NO: 40485 - RNA, 21 nt, RNAi
uucgaaugugcuaguauuaag

SEQ ID NO: 40486 - DNA, 21 bp, homo sapiens
cacgatcataattcaaaggtt

SEQ ID NO: 40487 - RNA, 21 nt, RNAi
cgaucauaauucaaagguuuu

SEQ ID NO: 40488 - RNA, 21 nt, RNAi
uugcuaguauuaaguuuccaa

SEQ ID NO: 40489 - DNA, 21 bp, homo sapiens
cagttcacatgtaaggtattg

SEQ ID NO: 40490 - RNA, 21 nt, RNAi
guucacauguaagguauuguu

SEQ ID NO: 40491 - RNA, 21 nt, RNAi
uucaaguguacauuccauaac

SEQ ID NO: 40492 - DNA, 21 bp, homo sapiens
cacatgtaaggtattgcaaat

SEQ ID NO: 40493 - RNA, 21 nt, RNAi
cauguaagguauugcaaauuu

SEQ ID NO: 40494 - RNA, 21 nt, RNAi
uuguacauuccauaacguuua

SEQ ID NO: 40495 - DNA, 21 bp, homo sapiens
caggcacaaggttcaagttta

SEQ ID NO: 40496 - RNA, 21 nt, RNAi
ggcacaagguucaaguuuauu

SEQ ID NO: 40497 - RNA, 21 nt, RNAi
uuccguguuccaaguucaaau

SEQ ID NO: 40498 - DNA, 21 bp, homo sapiens
cacaaggttcaagtttagatt

SEQ ID NO: 40499 - RNA, 21 nt, RNAi
caagguucaaguuuagauuuu

SEQ ID NO: 40500 - RNA, 21 nt, RNAi
uuguuccaaguucaaaucuaa

SEQ ID NO: 40501 - DNA, 21 bp, homo sapiens
cagtttgttaacctgacatct

SEQ ID NO: 40502 - RNA, 21 nt, RNAi
guuuguuaaccugacaucuuu

SEQ ID NO: 40503 - RNA, 21 nt, RNAi
uucaaacaauuggacuguaga

SEQ ID NO: 40504 - DNA, 21 bp, homo sapiens
catctctgccagtctagtttc

SEQ ID NO: 40505 - RNA, 21 nt, RNAi
ucucugccagucuaguuucuu

SEQ ID NO: 40506 - RNA, 21 nt, RNAi
uuagagacggucagaucaaag

SEQ ID NO: 40507 - DNA, 21 bp, homo sapiens
caggtttcctgtgtcagtatt

SEQ ID NO: 40508 - RNA, 21 nt, RNAi
gguuuccugugucaguauuuu

SEQ ID NO: 40509 - RNA, 21 nt, RNAi
uuccaaaggacacagucauaa

SEQ ID NO: 40510 - DNA, 21 bp, homo sapiens
caaggtatttggtagaggtgg

SEQ ID NO: 40511 - RNA, 21 nt, RNAi
agguauuugguagaggugguu

SEQ ID NO: 40512 - RNA, 21 nt, RNAi
uuuccauaaaccaucuccacc

SEQ ID NO: 40513 - DNA, 21 bp, homo sapiens
catatgtaaaccattgctgtg

SEQ ID NO: 40514 - RNA, 21 nt, RNAi
uauguaaaccauugcuguguu

SEQ ID NO: 40515 - RNA, 21 nt, RNAi
uuauacauuugguaacgacac

SEQ ID NO: 40516 - DNA, 21 bp, homo sapiens
cattgctgtgccattcaatgt

SEQ ID NO: 40517 - RNA, 21 nt, RNAi
uugcugugccauucaauguuu

SEQ ID NO: 40518 - RNA, 21 nt, RNAi
uuaacgacacgguaaguuaca

SEQ ID NO: 40519 - DNA, 21 bp, homo sapiens
caatgtttgatgcataattgg

SEQ ID NO: 40520 - RNA, 21 nt, RNAi
auguuugaugcauaauugguu

SEQ ID NO: 40521 - RNA, 21 nt, RNAi
uuuacaaacuacguauuaacc

SEQ ID NO: 40522 - DNA, 21 bp, homo sapiens
cataattggaccttgaatcga

SEQ ID NO: 40523 - RNA, 21 nt, RNAi
uaauuggaccuugaaucgauu

SEQ ID NO: 40524 - RNA, 21 nt, RNAi
uuauuaaccuggaacuuagcu

SEQ ID NO: 40525 - DNA, 21 bp, homo sapiens
gaaagatctcagagtaaagaa

SEQ ID NO: 40526 - RNA, 21 nt, RNAi
aagaucucagaguaaagaauu

SEQ ID NO: 40527 - RNA, 21 nt, RNAi
uuuucuagagucucauuucuu

SEQ ID NO: 40528 - DNA, 21 bp, homo sapiens
gatctcagagtaaagaagaac

SEQ ID NO: 40529 - RNA, 21 nt, RNAi
ucucagaguaaagaagaacuu

SEQ ID NO: 40530 - RNA, 21 nt, RNAi
uuagagucucauuucuucuug

SEQ ID NO: 40531 - DNA, 21 bp, homo sapiens
gatatgtgaagttgatttcca

SEQ ID NO: 40532 - RNA, 21 nt, RNAi
uaugugaaguugauuuccauu

SEQ ID NO: 40533 - RNA, 21 nt, RNAi
uuauacacuucaacuaaaggu

SEQ ID NO: 40534 - DNA, 21 bp, homo sapiens
gaagttgatttccatggaaac

SEQ ID NO: 40535 - RNA, 21 nt, RNAi
aguugauuuccauggaaacuu

SEQ ID NO: 40536 - RNA, 21 nt, RNAi
uuucaacuaaagguaccuuug

SEQ ID NO: 40537 - DNA, 21 bp, homo sapiens
gatttccatggaaacctcgtc

SEQ ID NO: 40538 - RNA, 21 nt, RNAi
uuuccauggaaaccucgucuu

SEQ ID NO: 40539 - RNA, 21 nt, RNAi
uuaaagguaccuuuggagcag

SEQ ID NO: 40540 - DNA, 21 bp, homo sapiens
gaaacctcgtcatcctctgat

SEQ ID NO: 40541 - RNA, 21 nt, RNAi
aaccucgucauccucugauuu

SEQ ID NO: 40542 - RNA, 21 nt, RNAi
uuuuggagcaguaggagacua

SEQ ID NO: 40543 - DNA, 21 bp, homo sapiens
gatgacagttgtgacagcttt

SEQ ID NO: 40544 - RNA, 21 nt, RNAi
ugacaguugugacagcuuuuu

SEQ ID NO: 40545 - RNA, 21 nt, RNAi
uuacugucaacacugucgaaa

SEQ ID NO: 40546 - DNA, 21 bp, homo sapiens
gacagttgtgacagctttgct

SEQ ID NO: 40547 - RNA, 21 nt, RNAi
caguugugacagcuuugcuuu

SEQ ID NO: 40548 - RNA, 21 nt, RNAi
uugucaacacugucgaaacga

SEQ ID NO: 40549 - DNA, 21 bp, homo sapiens
gacagctttgcttctgataat

SEQ ID NO: 40550 - RNA, 21 nt, RNAi
cagcuuugcuucugauaauuu

SEQ ID NO: 40551 - RNA, 21 nt, RNAi
uugucgaaacgaagacuauua

SEQ ID NO: 40552 - DNA, 21 bp, homo sapiens
gatgaagtttccagcgcggag

SEQ ID NO: 40553 - RNA, 21 nt, RNAi
ugaaguuuccagcgcggaguu

SEQ ID NO: 40554 - RNA, 21 nt, RNAi
uuacuucaaaggucgcgccuc

SEQ ID NO: 40555 - DNA, 21 bp, homo sapiens
gaagtttccagcgcggagtac

SEQ ID NO: 40556 - RNA, 21 nt, RNAi
aguuuccagcgcggaguacuu

SEQ ID NO: 40557 - RNA, 21 nt, RNAi
uuucaaaggucgcgccucaug

SEQ ID NO: 40558 - DNA, 21 bp, homo sapiens
gagaattctgtgactgattcc

SEQ ID NO: 40559 - RNA, 21 nt, RNAi
gaauucugugacugauuccuu

SEQ ID NO: 40560 - RNA, 21 nt, RNAi
uucuuaagacacugacuaagg

SEQ ID NO: 40561 - DNA, 21 bp, homo sapiens
gaattctgtgactgattccaa

SEQ ID NO: 40562 - RNA, 21 nt, RNAi
auucugugacugauuccaauu

SEQ ID NO: 40563 - RNA, 21 nt, RNAi
uuuaagacacugacuaagguu

SEQ ID NO: 40564 - DNA, 21 bp, homo sapiens
gactgattccaactccgattc

SEQ ID NO: 40565 - RNA, 21 nt, RNAi
cugauuccaacuccgauucuu

SEQ ID NO: 40566 - RNA, 21 nt, RNAi
uugacuaagguugaggcuaag

SEQ ID NO: 40567 - DNA, 21 bp, homo sapiens
gattccaactccgattcagaa

SEQ ID NO: 40568 - RNA, 21 nt, RNAi
uuccaacuccgauucagaauu

SEQ ID NO: 40569 - RNA, 21 nt, RNAi
uuaagguugaggcuaagucuu

SEQ ID NO: 40570 - DNA, 21 bp, homo sapiens
gattcagaagatgaaagtgga

SEQ ID NO: 40571 - RNA, 21 nt, RNAi
uucagaagaugaaaguggauu

SEQ ID NO: 40572 - RNA, 21 nt, RNAi
uuaagucuucuacuuucaccu

SEQ ID NO: 40573 - DNA, 21 bp, homo sapiens
gaagatgaaagtggaatgaat

SEQ ID NO: 40574 - RNA, 21 nt, RNAi
agaugaaaguggaaugaauuu

SEQ ID NO: 40575 - RNA, 21 nt, RNAi
uuucuacuuucaccuuacuua

SEQ ID NO: 40576 - DNA, 21 bp, homo sapiens
gactcacaatcaaggagaccg

SEQ ID NO: 40577 - RNA, 21 nt, RNAi
cucacaaucaaggagaccguu

SEQ ID NO: 40578 - RNA, 21 nt, RNAi
uugaguguuaguuccucuggc

SEQ ID NO: 40579 - DNA, 21 bp, homo sapiens
gagaccgcgaaggcgtacatt

SEQ ID NO: 40580 - RNA, 21 nt, RNAi
gaccgcgaaggcguacauuuu

SEQ ID NO: 40581 - RNA, 21 nt, RNAi
uucuggcgcuuccgcauguaa

SEQ ID NO: 40582 - DNA, 21 bp, homo sapiens
gaccgcgaaggcgtacattcc

SEQ ID NO: 40583 - RNA, 21 nt, RNAi
ccgcgaaggcguacauuccuu

SEQ ID NO: 40584 - RNA, 21 nt, RNAi
uuggcgcuuccgcauguaagg

SEQ ID NO: 40585 - DNA, 21 bp, homo sapiens
gaacggagagctcgtcctctt

SEQ ID NO: 40586 - RNA, 21 nt, RNAi
acggagagcucguccucuuuu

SEQ ID NO: 40587 - RNA, 21 nt, RNAi
uuugccucucgagcaggagaa

SEQ ID NO: 40588 - DNA, 21 bp, homo sapiens
gagagctcgtcctcttaccag

SEQ ID NO: 40589 - RNA, 21 nt, RNAi
gagcucguccucuuaccaguu

SEQ ID NO: 40590 - RNA, 21 nt, RNAi
uucucgagcaggagaaugguc

SEQ ID NO: 40591 - DNA, 21 bp, homo sapiens
gagctcgtcctcttaccaggt

SEQ ID NO: 40592 - RNA, 21 nt, RNAi
gcucguccucuuaccagguuu

SEQ ID NO: 40593 - RNA, 21 nt, RNAi
uucgagcaggagaauggucca

SEQ ID NO: 40594 - DNA, 21 bp, homo sapiens
gaggaggaggaggaagaggat

SEQ ID NO: 40595 - RNA, 21 nt, RNAi
ggaggaggaggaagaggauuu

SEQ ID NO: 40596 - RNA, 21 nt, RNAi
uuccuccuccuccuucuccua

SEQ ID NO: 40597 - DNA, 21 bp, homo sapiens
gaggaggaggaagaggataag

SEQ ID NO: 40598 - RNA, 21 nt, RNAi
ggaggaggaagaggauaaguu

SEQ ID NO: 40599 - RNA, 21 nt, RNAi
uuccuccuccuucuccuauuc

SEQ ID NO: 40600 - DNA, 21 bp, homo sapiens
gaggaggaagaggataagtac

SEQ ID NO: 40601 - RNA, 21 nt, RNAi
ggaggaagaggauaaguacuu

SEQ ID NO: 40602 - RNA, 21 nt, RNAi
uuccuccuucuccuauucaug

SEQ ID NO: 40603 - DNA, 21 bp, homo sapiens
gaggaagaggataagtacatg

SEQ ID NO: 40604 - RNA, 21 nt, RNAi
ggaagaggauaaguacauguu

SEQ ID NO: 40605 - RNA, 21 nt, RNAi
uuccuucuccuauucauguac

SEQ ID NO: 40606 - DNA, 21 bp, homo sapiens
gaagaggataagtacatgttg

SEQ ID NO: 40607 - RNA, 21 nt, RNAi
agaggauaaguacauguuguu

SEQ ID NO: 40608 - RNA, 21 nt, RNAi
uuucuccuauucauguacaac

SEQ ID NO: 40609 - DNA, 21 bp, homo sapiens
gaggataagtacatgttggtg

SEQ ID NO: 40610 - RNA, 21 nt, RNAi
ggauaaguacauguugguguu

SEQ ID NO: 40611 - RNA, 21 nt, RNAi
uuccuauucauguacaaccac

SEQ ID NO: 40612 - DNA, 21 bp, homo sapiens
gataagtacatgttggtgaga

SEQ ID NO: 40613 - RNA, 21 nt, RNAi
uaaguacauguuggugagauu

SEQ ID NO: 40614 - RNA, 21 nt, RNAi
uuauucauguacaaccacucu

SEQ ID NO: 40615 - DNA, 21 bp, homo sapiens
gagaaagaggaagaccgtgga

SEQ ID NO: 40616 - RNA, 21 nt, RNAi
gaaagaggaagaccguggauu

SEQ ID NO: 40617 - RNA, 21 nt, RNAi
uucuuucuccuucuggcaccu

SEQ ID NO: 40618 - DNA, 21 bp, homo sapiens
gaaagaggaagaccgtggatg

SEQ ID NO: 40619 - RNA, 21 nt, RNAi
aagaggaagaccguggauguu

SEQ ID NO: 40620 - RNA, 21 nt, RNAi
uuuucuccuucuggcaccuac

SEQ ID NO: 40621 - DNA, 21 bp, homo sapiens
gaggaagaccgtggatggcta

SEQ ID NO: 40622 - RNA, 21 nt, RNAi
ggaagaccguggauggcuauu

SEQ ID NO: 40623 - RNA, 21 nt, RNAi
uuccuucuggcaccuaccgau

SEQ ID NO: 40624 - DNA, 21 bp, homo sapiens
gaagaccgtggatggctacat

SEQ ID NO: 40625 - RNA, 21 nt, RNAi
agaccguggauggcuacauuu

SEQ ID NO: 40626 - RNA, 21 nt, RNAi
uuucuggcaccuaccgaugua

SEQ ID NO: 40627 - DNA, 21 bp, homo sapiens
gaccgtggatggctacatgaa

SEQ ID NO: 40628 - RNA, 21 nt, RNAi
ccguggauggcuacaugaauu

SEQ ID NO: 40629 - RNA, 21 nt, RNAi
uuggcaccuaccgauguacuu

SEQ ID NO: 40630 - DNA, 21 bp, homo sapiens
gatggctacatgaatgaagat

SEQ ID NO: 40631 - RNA, 21 nt, RNAi
uggcuacaugaaugaagauuu

SEQ ID NO: 40632 - RNA, 21 nt, RNAi
uuaccgauguacuuacuucua

SEQ ID NO: 40633 - DNA, 21 bp, homo sapiens
gaagccgtcgctccagatcat

SEQ ID NO: 40634 - RNA, 21 nt, RNAi
agccgucgcuccagaucauuu

SEQ ID NO: 40635 - RNA, 21 nt, RNAi
uuucggcagcgaggucuagua

SEQ ID NO: 40636 - DNA, 21 bp, homo sapiens
gaagaaattacagaggaggag

SEQ ID NO: 40637 - RNA, 21 nt, RNAi
agaaauuacagaggaggaguu

SEQ ID NO: 40638 - RNA, 21 nt, RNAi
uuucuuuaaugucuccuccuc

SEQ ID NO: 40639 - DNA, 21 bp, homo sapiens
gaaattacagaggaggagttg

SEQ ID NO: 40640 - RNA, 21 nt, RNAi
aauuacagaggaggaguuguu

SEQ ID NO: 40641 - RNA, 21 nt, RNAi
uuuuaaugucuccuccucaac

SEQ ID NO: 40642 - DNA, 21 bp, homo sapiens
gaggaggagttggagaacgtc

SEQ ID NO: 40643 - RNA, 21 nt, RNAi
ggaggaguuggagaacgucuu

SEQ ID NO: 40644 - RNA, 21 nt, RNAi
uuccuccucaaccucuugcag

SEQ ID NO: 40645 - DNA, 21 bp, homo sapiens
gaggagttggagaacgtctgc

SEQ ID NO: 40646 - RNA, 21 nt, RNAi
ggaguuggagaacgucugcuu

SEQ ID NO: 40647 - RNA, 21 nt, RNAi
uuccucaaccucuugcagacg

SEQ ID NO: 40648 - DNA, 21 bp, homo sapiens
gagttggagaacgtctgcagc

SEQ ID NO: 40649 - RNA, 21 nt, RNAi
guuggagaacgucugcagcuu

SEQ ID NO: 40650 - RNA, 21 nt, RNAi
uucaaccucuugcagacgucg

SEQ ID NO: 40651 - DNA, 21 bp, homo sapiens
gagaacgtctgcagcaattct

SEQ ID NO: 40652 - RNA, 21 nt, RNAi
gaacgucugcagcaauucuuu

SEQ ID NO: 40653 - RNA, 21 nt, RNAi
uucuugcagacgucguuaaga

SEQ ID NO: 40654 - DNA, 21 bp, homo sapiens
gaacgtctgcagcaattctcg

SEQ ID NO: 40655 - RNA, 21 nt, RNAi
acgucugcagcaauucucguu

SEQ ID NO: 40656 - RNA, 21 nt, RNAi
uuugcagacgucguuaagagc

SEQ ID NO: 40657 - DNA, 21 bp, homo sapiens
gagagaagatatataaccgtt

SEQ ID NO: 40658 - RNA, 21 nt, RNAi
gagaagauauauaaccguuuu

SEQ ID NO: 40659 - RNA, 21 nt, RNAi
uucucuucuauauauuggcaa

SEQ ID NO: 40660 - DNA, 21 bp, homo sapiens
gagaagatatataaccgttca

SEQ ID NO: 40661 - RNA, 21 nt, RNAi
gaagauauauaaccguucauu

SEQ ID NO: 40662 - RNA, 21 nt, RNAi
uucuucuauauauuggcaagu

SEQ ID NO: 40663 - DNA, 21 bp, homo sapiens
gaagatatataaccgttcact

SEQ ID NO: 40664 - RNA, 21 nt, RNAi
agauauauaaccguucacuuu

SEQ ID NO: 40665 - RNA, 21 nt, RNAi
uuucuauauauuggcaaguga

SEQ ID NO: 40666 - DNA, 21 bp, homo sapiens
gaaaccgttatggtgaagagg

SEQ ID NO: 40667 - RNA, 21 nt, RNAi
aaccguuauggugaagagguu

SEQ ID NO: 40668 - RNA, 21 nt, RNAi
uuuuggcaauaccacuucucc

SEQ ID NO: 40669 - DNA, 21 bp, homo sapiens
gatgctctgctggatccgaac

SEQ ID NO: 40670 - RNA, 21 nt, RNAi
ugcucugcuggauccgaacuu

SEQ ID NO: 40671 - RNA, 21 nt, RNAi
uuacgagacgaccuaggcuug

SEQ ID NO: 40672 - DNA, 21 bp, homo sapiens
gaggaatctgcaactgcagtt

SEQ ID NO: 40673 - RNA, 21 nt, RNAi
ggaaucugcaacugcaguuuu

SEQ ID NO: 40674 - RNA, 21 nt, RNAi
uuccuuagacguugacgucaa

SEQ ID NO: 40675 - DNA, 21 bp, homo sapiens
gaatctgcaactgcagtttct

SEQ ID NO: 40676 - RNA, 21 nt, RNAi
aucugcaacugcaguuucuuu

SEQ ID NO: 40677 - RNA, 21 nt, RNAi
uuuagacguugacgucaaaga

SEQ ID NO: 40678 - DNA, 21 bp, homo sapiens
gagatggacggtgtgcgactg

SEQ ID NO: 40679 - RNA, 21 nt, RNAi
gauggacggugugcgacuguu

SEQ ID NO: 40680 - RNA, 21 nt, RNAi
uucuaccugccacacgcugac

SEQ ID NO: 40681 - DNA, 21 bp, homo sapiens
gaatgtgcatgcctacttgaa

SEQ ID NO: 40682 - RNA, 21 nt, RNAi
augugcaugccuacuugaauu

SEQ ID NO: 40683 - RNA, 21 nt, RNAi
uuuacacguacggaugaacuu

SEQ ID NO: 40684 - DNA, 21 bp, homo sapiens
gaaacaggaatttgaaatgca

SEQ ID NO: 40685 - RNA, 21 nt, RNAi
aacaggaauuugaaaugcauu

SEQ ID NO: 40686 - RNA, 21 nt, RNAi
uuuuguccuuaaacuuuacgu

SEQ ID NO: 40687 - DNA, 21 bp, homo sapiens
gaaatgcaagcataatatctg

SEQ ID NO: 40688 - RNA, 21 nt, RNAi
aaugcaagcauaauaucuguu

SEQ ID NO: 40689 - RNA, 21 nt, RNAi
uuuuacguucguauuauagac

SEQ ID NO: 40690 - DNA, 21 bp, homo sapiens
gatgatcagcctgtttcataa

SEQ ID NO: 40691 - RNA, 21 nt, RNAi
ugaucagccuguuucauaauu

SEQ ID NO: 40692 - RNA, 21 nt, RNAi
uuacuagucggacaaaguauu

SEQ ID NO: 40693 - DNA, 21 bp, homo sapiens
gatcagcctgtttcataagaa

SEQ ID NO: 40694 - RNA, 21 nt, RNAi
ucagccuguuucauaagaauu

SEQ ID NO: 40695 - RNA, 21 nt, RNAi
uuagucggacaaaguauucuu

SEQ ID NO: 40696 - DNA, 21 bp, homo sapiens
gaaactccaatcaagttaatc

SEQ ID NO: 40697 - RNA, 21 nt, RNAi
aacuccaaucaaguuaaucuu

SEQ ID NO: 40698 - RNA, 21 nt, RNAi
uuuugagguuaguucaauuag

SEQ ID NO: 40699 - DNA, 21 bp, homo sapiens
gacatgtgtttctggagcatc

SEQ ID NO: 40700 - RNA, 21 nt, RNAi
cauguguuucuggagcaucuu

SEQ ID NO: 40701 - RNA, 21 nt, RNAi
uuguacacaaagaccucguag

SEQ ID NO: 40702 - DNA, 21 bp, homo sapiens
gagcatcacagaaggtatatt

SEQ ID NO: 40703 - RNA, 21 nt, RNAi
gcaucacagaagguauauuuu

SEQ ID NO: 40704 - RNA, 21 nt, RNAi
uucguagugucuuccauauaa

SEQ ID NO: 40705 - DNA, 21 bp, homo sapiens
gaaggtatattgctagttaca

SEQ ID NO: 40706 - RNA, 21 nt, RNAi
agguauauugcuaguuacauu

SEQ ID NO: 40707 - RNA, 21 nt, RNAi
uuuccauauaacgaucaaugu

SEQ ID NO: 40708 - DNA, 21 bp, homo sapiens
gaatttcagagaagagccttc

SEQ ID NO: 40709 - RNA, 21 nt, RNAi
auuucagagaagagccuucuu

SEQ ID NO: 40710 - RNA, 21 nt, RNAi
uuuaaagucucuucucggaag

SEQ ID NO: 40711 - DNA, 21 bp, homo sapiens
gagaagagccttctaacttgt

SEQ ID NO: 40712 - RNA, 21 nt, RNAi
gaagagccuucuaacuuguuu

SEQ ID NO: 40713 - RNA, 21 nt, RNAi
uucuucucggaagauugaaca

SEQ ID NO: 40714 - DNA, 21 bp, homo sapiens
gaagagccttctaacttgttt

SEQ ID NO: 40715 - RNA, 21 nt, RNAi
agagccuucuaacuuguuuuu

SEQ ID NO: 40716 - RNA, 21 nt, RNAi
uuucucggaagauugaacaaa

SEQ ID NO: 40717 - DNA, 21 bp, homo sapiens
gagccttctaacttgtttaca

SEQ ID NO: 40718 - RNA, 21 nt, RNAi
gccuucuaacuuguuuacauu

SEQ ID NO: 40719 - RNA, 21 nt, RNAi
uucggaagauugaacaaaugu

SEQ ID NO: 40720 - DNA, 21 bp, homo sapiens
gagtatgatttagcactcata

SEQ ID NO: 40721 - RNA, 21 nt, RNAi
guaugauuuagcacucauauu

SEQ ID NO: 40722 - RNA, 21 nt, RNAi
uucauacuaaaucgugaguau

SEQ ID NO: 40723 - DNA, 21 bp, homo sapiens
gatttagcactcatactagtt

SEQ ID NO: 40724 - RNA, 21 nt, RNAi
uuuagcacucauacuaguuuu

SEQ ID NO: 40725 - RNA, 21 nt, RNAi
uuaaaucgugaguaugaucaa

SEQ ID NO: 40726 - DNA, 21 bp, homo sapiens
gatcataattcaaaggttggt

SEQ ID NO: 40727 - RNA, 21 nt, RNAi
ucauaauucaaagguugguuu

SEQ ID NO: 40728 - RNA, 21 nt, RNAi
uuaguauuaaguuuccaacca

SEQ ID NO: 40729 - DNA, 21 bp, homo sapiens
gatggaagagctatctggaga

SEQ ID NO: 40730 - RNA, 21 nt, RNAi
uggaagagcuaucuggagauu

SEQ ID NO: 40731 - RNA, 21 nt, RNAi
uuaccuucucgauagaccucu

SEQ ID NO: 40732 - DNA, 21 bp, homo sapiens
gaagagctatctggagattat

SEQ ID NO: 40733 - RNA, 21 nt, RNAi
agagcuaucuggagauuauuu

SEQ ID NO: 40734 - RNA, 21 nt, RNAi
uuucucgauagaccucuaaua

SEQ ID NO: 40735 - DNA, 21 bp, homo sapiens
gagctatctggagattatgag

SEQ ID NO: 40736 - RNA, 21 nt, RNAi
gcuaucuggagauuaugaguu

SEQ ID NO: 40737 - RNA, 21 nt, RNAi
uucgauagaccucuaauacuc

SEQ ID NO: 40738 - DNA, 21 bp, homo sapiens
gagattatgagtaagctgatt

SEQ ID NO: 40739 - RNA, 21 nt, RNAi
gauuaugaguaagcugauuuu

SEQ ID NO: 40740 - RNA, 21 nt, RNAi
uucuaauacucauucgacuaa

SEQ ID NO: 40741 - DNA, 21 bp, homo sapiens
gattatgagtaagctgatttg

SEQ ID NO: 40742 - RNA, 21 nt, RNAi
uuaugaguaagcugauuuguu

SEQ ID NO: 40743 - RNA, 21 nt, RNAi
uuaauacucauucgacuaaac

SEQ ID NO: 40744 - DNA, 21 bp, homo sapiens
gacatctctgccagtctagtt

SEQ ID NO: 40745 - RNA, 21 nt, RNAi
caucucugccagucuaguuuu

SEQ ID NO: 40746 - RNA, 21 nt, RNAi
uuguagagacggucagaucaa

SEQ ID NO: 40747 - DNA, 21 bp, homo sapiens
gaggtggaatctaagtgtttg

SEQ ID NO: 40748 - RNA, 21 nt, RNAi
gguggaaucuaaguguuuguu

SEQ ID NO: 40749 - RNA, 21 nt, RNAi
uuccaccuuagauucacaaac

SEQ ID NO: 40750 - DNA, 21 bp, homo sapiens
gaatctaagtgtttgtatgtc

SEQ ID NO: 40751 - RNA, 21 nt, RNAi
aucuaaguguuuguaugucuu

SEQ ID NO: 40752 - RNA, 21 nt, RNAi
uuuagauucacaaacauacag

SEQ ID NO: 40753 - DNA, 21 bp, homo sapiens
gatgcataattggaccttgaa

SEQ ID NO: 40754 - RNA, 21 nt, RNAi
ugcauaauuggaccuugaauu

SEQ ID NO: 40755 - RNA, 21 nt, RNAi
uuacguauuaaccuggaacuu

SEQ ID NO: 40756 - DNA, 21 bp, homo sapiens
gaccttgaatcgataagtgta

SEQ ID NO: 40757 - RNA, 21 nt, RNAi
ccuugaaucgauaaguguauu

SEQ ID NO: 40758 - RNA, 21 nt, RNAi
uuggaacuuagcuauucacau

SEQ ID NO: 40759 - DNA, 21 bp, homo sapiens
tatgtgaagttgatttccatg

SEQ ID NO: 40760 - RNA, 21 nt, RNAi
ugugaaguugauuuccauguu

SEQ ID NO: 40761 - RNA, 21 nt, RNAi
uuacacuucaacuaaagguac

SEQ ID NO: 40762 - DNA, 21 bp, homo sapiens
taagtacatgttggtgagaaa

SEQ ID NO: 40763 - RNA, 21 nt, RNAi
aguacauguuggugagaaauu

SEQ ID NO: 40764 - RNA, 21 nt, RNAi
uuucauguacaaccacucuuu

SEQ ID NO: 40765 - DNA, 21 bp, homo sapiens
tacatgttggtgagaaagagg

SEQ ID NO: 40766 - RNA, 21 nt, RNAi
cauguuggugagaaagagguu

SEQ ID NO: 40767 - RNA, 21 nt, RNAi
uuguacaaccacucuuucucc

SEQ ID NO: 40768 - DNA, 21 bp, homo sapiens
tacatgaatgaagatgacctg

SEQ ID NO: 40769 - RNA, 21 nt, RNAi
caugaaugaagaugaccuguu

SEQ ID NO: 40770 - RNA, 21 nt, RNAi
uuguacuuacuucuacuggac

SEQ ID NO: 40771 - DNA, 21 bp, homo sapiens
tacagaggaggagttggagaa

SEQ ID NO: 40772 - RNA, 21 nt, RNAi
cagaggaggaguuggagaauu

SEQ ID NO: 40773 - RNA, 21 nt, RNAi
uugucuccuccucaaccucuu

SEQ ID NO: 40774 - DNA, 21 bp, homo sapiens
tacttgtcatcaatgccgtca

SEQ ID NO: 40775 - RNA, 21 nt, RNAi
cuugucaucaaugccgucauu

SEQ ID NO: 40776 - RNA, 21 nt, RNAi
uugaacaguaguuacggcagu

SEQ ID NO: 40777 - DNA, 21 bp, homo sapiens
tatttagccaaatatcatggc

SEQ ID NO: 40778 - RNA, 21 nt, RNAi
uuuagccaaauaucauggcuu

SEQ ID NO: 40779 - RNA, 21 nt, RNAi
uuaaaucgguuuauaguaccg

SEQ ID NO: 40780 - DNA, 21 bp, homo sapiens
tagccaaatatcatggctttg

SEQ ID NO: 40781 - RNA, 21 nt, RNAi
gccaaauaucauggcuuuguu

SEQ ID NO: 40782 - RNA, 21 nt, RNAi
uucgguuuauaguaccgaaac

SEQ ID NO: 40783 - DNA, 21 bp, homo sapiens
taatcttagcagacatgtgtt

SEQ ID NO: 40784 - RNA, 21 nt, RNAi
aucuuagcagacauguguuuu

SEQ ID NO: 40785 - RNA, 21 nt, RNAi
uuuagaaucgucuguacacaa

SEQ ID NO: 40786 - DNA, 21 bp, homo sapiens
tagcagacatgtgtttctgga

SEQ ID NO: 40787 - RNA, 21 nt, RNAi
gcagacauguguuucuggauu

SEQ ID NO: 40788 - RNA, 21 nt, RNAi
uucgucuguacacaaagaccu

SEQ ID NO: 40789 - DNA, 21 bp, homo sapiens
tattgctagttacactttgcc

SEQ ID NO: 40790 - RNA, 21 nt, RNAi
uugcuaguuacacuuugccuu

SEQ ID NO: 40791 - RNA, 21 nt, RNAi
uuaacgaucaaugugaaacgg

SEQ ID NO: 40792 - DNA, 21 bp, homo sapiens
tatttccaatgctcctctcca

SEQ ID NO: 40793 - RNA, 21 nt, RNAi
uuuccaaugcuccucuccauu

SEQ ID NO: 40794 - RNA, 21 nt, RNAi
uuaaagguuacgaggagaggu

SEQ ID NO: 40795 - DNA, 21 bp, homo sapiens
taagcacttggaaacacaata

SEQ ID NO: 40796 - RNA, 21 nt, RNAi
agcacuuggaaacacaauauu

SEQ ID NO: 40797 - RNA, 21 nt, RNAi
uuucgugaaccuuuguguuau

SEQ ID NO: 40798 - DNA, 21 bp, homo sapiens
tattgaatttcagagaagagc

SEQ ID NO: 40799 - RNA, 21 nt, RNAi
uugaauuucagagaagagcuu

SEQ ID NO: 40800 - RNA, 21 nt, RNAi
uuaacuuaaagucucuucucg

SEQ ID NO: 40801 - DNA, 21 bp, homo sapiens
tagcactcatactagttgaaa

SEQ ID NO: 40802 - RNA, 21 nt, RNAi
gcacucauacuaguugaaauu

SEQ ID NO: 40803 - RNA, 21 nt, RNAi
uucgugaguaugaucaacuuu

SEQ ID NO: 40804 - DNA, 21 bp, homo sapiens
tattgcagattgatgtctctc

SEQ ID NO: 40805 - RNA, 21 nt, RNAi
uugcagauugaugucucucuu

SEQ ID NO: 40806 - RNA, 21 nt, RNAi
uuaacgucuaacuacagagag

SEQ ID NO: 40807 - DNA, 21 bp, homo sapiens
tattgcgcttatgttacaagt

SEQ ID NO: 40808 - RNA, 21 nt, RNAi
uugcgcuuauguuacaaguuu

SEQ ID NO: 40809 - RNA, 21 nt, RNAi
uuaacgcgaauacaauguuca

SEQ ID NO: 40810 - DNA, 21 bp, homo sapiens
tatgttacaagttgttgtcac

SEQ ID NO: 40811 - RNA, 21 nt, RNAi
uguuacaaguuguugucacuu

SEQ ID NO: 40812 - RNA, 21 nt, RNAi
uuacaauguucaacaacagug

SEQ ID NO: 40813 - DNA, 21 bp, homo sapiens
tacaagttgttgtcacagttg

SEQ ID NO: 40814 - RNA, 21 nt, RNAi
caaguuguugucacaguuguu

SEQ ID NO: 40815 - RNA, 21 nt, RNAi
uuguucaacaacagugucaac

SEQ ID NO: 40816 - DNA, 21 bp, homo sapiens
taagtggtgcgtccagcttac

SEQ ID NO: 40817 - RNA, 21 nt, RNAi
aguggugcguccagcuuacuu

SEQ ID NO: 40818 - RNA, 21 nt, RNAi
uuucaccacgcaggucgaaug

SEQ ID NO: 40819 - DNA, 21 bp, homo sapiens
tacacgatcataattcaaagg

SEQ ID NO: 40820 - RNA, 21 nt, RNAi
cacgaucauaauucaaagguu

SEQ ID NO: 40821 - RNA, 21 nt, RNAi
uugugcuaguauuaaguuucc

SEQ ID NO: 40822 - DNA, 21 bp, homo sapiens
taatgatggaagagctatctg

SEQ ID NO: 40823 - RNA, 21 nt, RNAi
augauggaagagcuaucuguu

SEQ ID NO: 40824 - RNA, 21 nt, RNAi
uuuacuaccuucucgauagac

SEQ ID NO: 40825 - DNA, 21 bp, homo sapiens
tatctggagattatgagtaag

SEQ ID NO: 40826 - RNA, 21 nt, RNAi
ucuggagauuaugaguaaguu

SEQ ID NO: 40827 - RNA, 21 nt, RNAi
uuagaccucuaauacucauuc

SEQ ID NO: 40828 - DNA, 21 bp, homo sapiens
tatttcagttcacatgtaagg

SEQ ID NO: 40829 - RNA, 21 nt, RNAi
uuucaguucacauguaagguu

SEQ ID NO: 40830 - RNA, 21 nt, RNAi
uuaaagucaaguguacauucc

SEQ ID NO: 40831 - DNA, 21 bp, homo sapiens
tagtctgtggttctttgcagt

SEQ ID NO: 40832 - RNA, 21 nt, RNAi
gucugugguucuuugcaguuu

SEQ ID NO: 40833 - RNA, 21 nt, RNAi
uucagacaccaagaaacguca

SEQ ID NO: 40834 - DNA, 21 bp, homo sapiens
tataaaccaggcacaaggttc

SEQ ID NO: 40835 - RNA, 21 nt, RNAi
uaaaccaggcacaagguucuu

SEQ ID NO: 40836 - RNA, 21 nt, RNAi
uuauuugguccguguuccaag

SEQ ID NO: 40837 - DNA, 21 bp, homo sapiens
taaaccaggcacaaggttcaa

SEQ ID NO: 40838 - RNA, 21 nt, RNAi
aaccaggcacaagguucaauu

SEQ ID NO: 40839 - RNA, 21 nt, RNAi
uuuugguccguguuccaaguu

SEQ ID NO: 40840 - DNA, 21 bp, homo sapiens
tagcagtttgttaacctgaca

SEQ ID NO: 40841 - RNA, 21 nt, RNAi
gcaguuuguuaaccugacauu

SEQ ID NO: 40842 - RNA, 21 nt, RNAi
uucgucaaacaauuggacugu

SEQ ID NO: 40843 - DNA, 21 bp, homo sapiens
taacctgacatctctgccagt

SEQ ID NO: 40844 - RNA, 21 nt, RNAi
accugacaucucugccaguuu

SEQ ID NO: 40845 - RNA, 21 nt, RNAi
uuuggacuguagagacgguca

SEQ ID NO: 40846 - DNA, 21 bp, homo sapiens
taatcaaggtatttggtagag

SEQ ID NO: 40847 - RNA, 21 nt, RNAi
aucaagguauuugguagaguu

SEQ ID NO: 40848 - RNA, 21 nt, RNAi
uuuaguuccauaaaccaucuc

SEQ ID NO: 40849 - DNA, 21 bp, homo sapiens
tatttggtagaggtggaatct

SEQ ID NO: 40850 - RNA, 21 nt, RNAi
uuugguagagguggaaucuuu

SEQ ID NO: 40851 - RNA, 21 nt, RNAi
uuaaaccaucuccaccuuaga

SEQ ID NO: 40852 - DNA, 21 bp, homo sapiens
tagaggtggaatctaagtgtt

SEQ ID NO: 40853 - RNA, 21 nt, RNAi
gagguggaaucuaaguguuuu

SEQ ID NO: 40854 - RNA, 21 nt, RNAi
uucuccaccuuagauucacaa

SEQ ID NO: 40855 - DNA, 21 bp, homo sapiens
tatgtaaaccattgctgtgcc

SEQ ID NO: 40856 - RNA, 21 nt, RNAi
uguaaaccauugcugugccuu

SEQ ID NO: 40857 - RNA, 21 nt, RNAi
uuacauuugguaacgacacgg

SEQ ID NO: 40858 - DNA, 21 bp, homo sapiens
taaaccattgctgtgccattc

SEQ ID NO: 40859 - RNA, 21 nt, RNAi
aaccauugcugugccauucuu

SEQ ID NO: 40860 - RNA, 21 nt, RNAi
uuuugguaacgacacgguaag

SEQ ID NO: 40861 - DNA, 21 bp, homo sapiens
taattggaccttgaatcgata

SEQ ID NO: 40862 - RNA, 21 nt, RNAi
auuggaccuugaaucgauauu

SEQ ID NO: 40863 - RNA, 21 nt, RNAi
uuuaaccuggaacuuagcuau

SEQ ID NO: 40864 - DNA, 21 bp, homo sapiens
aagaggataagtacatgttgg

SEQ ID NO: 40865 - RNA, 21 nt, RNAi
gaggauaaguacauguugguu

SEQ ID NO: 40866 - RNA, 21 nt, RNAi
uucuccuauucauguacaacc

SEQ ID NO: 40867 - DNA, 21 bp, homo sapiens
aagatatataaccgttcactg

SEQ ID NO: 40868 - RNA, 21 nt, RNAi
gauauauaaccguucacuguu

SEQ ID NO: 40869 - RNA, 21 nt, RNAi
uucuauauauuggcaagugac

SEQ ID NO: 40870 - DNA, 21 bp, homo sapiens
aatgccgtcagaagactattg

SEQ ID NO: 40871 - RNA, 21 nt, RNAi
ugccgucagaagacuauuguu

SEQ ID NO: 40872 - RNA, 21 nt, RNAi
uuacggcagucuucugauaac

SEQ ID NO: 40873 - DNA, 21 bp, homo sapiens
aaaccgttatggtgaagaggt

SEQ ID NO: 40874 - RNA, 21 nt, RNAi
accguuauggugaagagguuu

SEQ ID NO: 40875 - RNA, 21 nt, RNAi
uuuggcaauaccacuucucca

SEQ ID NO: 40876 - DNA, 21 bp, homo sapiens
aaccgttatggtgaagaggtc

SEQ ID NO: 40877 - RNA, 21 nt, RNAi
ccguuauggugaagaggucuu

SEQ ID NO: 40878 - RNA, 21 nt, RNAi
uuggcaauaccacuucuccag

SEQ ID NO: 40879 - DNA, 21 bp, homo sapiens
cacaatcaaggagaccgcgaa

SEQ ID NO: 40880 - RNA, 21 nt, RNAi
caaucaaggagaccgcgaauu

SEQ ID NO: 40881 - RNA, 21 nt, RNAi
uuguuaguuccucuggcgcuu

SEQ ID NO: 40882 - DNA, 21 bp, homo sapiens
caatgccgtcagaagactatt

SEQ ID NO: 40883 - RNA, 21 nt, RNAi
augccgucagaagacuauuuu

SEQ ID NO: 40884 - RNA, 21 nt, RNAi
uuuacggcagucuucugauaa

SEQ ID NO: 40885 - DNA, 21 bp, homo sapiens
gactgattccaactccgattc

SEQ ID NO: 40886 - RNA, 21 nt, RNAi
cugauuccaacuccgauucuu

SEQ ID NO: 40887 - RNA, 21 nt, RNAi
uugacuaagguugaggcuaag

SEQ ID NO: 40888 - DNA, 21 bp, homo sapiens
gattccaactccgattcagaa

SEQ ID NO: 40889 - RNA, 21 nt, RNAi
uuccaacuccgauucagaauu

SEQ ID NO: 40890 - RNA, 21 nt, RNAi
uuaagguugaggcuaagucuu

SEQ ID NO: 40891 - DNA, 21 bp, homo sapiens
gaggaagaggataagtacatg

SEQ ID NO: 40892 - RNA, 21 nt, RNAi
ggaagaggauaaguacauguu

SEQ ID NO: 40893 - RNA, 21 nt, RNAi
uuccuucuccuauucauguac

SEQ ID NO: 40894 - DNA, 21 bp, homo sapiens
gaagaggataagtacatgttg

SEQ ID NO: 40895 - RNA, 21 nt, RNAi
agaggauaaguacauguuguu

SEQ ID NO: 40896 - RNA, 21 nt, RNAi
uuucuccuauucauguacaac

SEQ ID NO: 40897 - DNA, 21 bp, homo sapiens
gagaacgtctgcagcaattct

SEQ ID NO: 40898 - RNA, 21 nt, RNAi
gaacgucugcagcaauucuuu

SEQ ID NO: 40899 - RNA, 21 nt, RNAi
uucuugcagacgucguuaaga

SEQ ID NO: 40900 - DNA, 21 bp, homo sapiens
gaaaccgttatggtgaagagg

SEQ ID NO: 40901 - RNA, 21 nt, RNAi
aaccguuauggugaagagguu

SEQ ID NO: 40902 - RNA, 21 nt, RNAi
uuuuggcaauaccacuucucc

SEQ ID NO: 40903 - DNA, 21 bp, homo sapiens
aagttctatcttggcgctaaa

SEQ ID NO: 40904 - RNA, 21 nt, RNAi
guucuaucuuggcgcuaaauu

SEQ ID NO: 40905 - RNA, 21 nt, RNAi
uucaagauagaaccgcgauuu

SEQ ID NO: 40906 - DNA, 21 bp, homo sapiens
aaactcaaggaacatctgttg

SEQ ID NO: 40907 - RNA, 21 nt, RNAi
acucaaggaacaucuguuguu

SEQ ID NO: 40908 - RNA, 21 nt, RNAi
uuugaguuccuuguagacaac

SEQ ID NO: 40909 - DNA, 21 bp, homo sapiens
aactcaaggaacatctgttga

SEQ ID NO: 40910 - RNA, 21 nt, RNAi
cucaaggaacaucuguugauu

SEQ ID NO: 40911 - RNA, 21 nt, RNAi
uugaguuccuuguagacaacu

SEQ ID NO: 40912 - DNA, 21 bp, homo sapiens
aaggaacatctgttgagaaga

SEQ ID NO: 40913 - RNA, 21 nt, RNAi
ggaacaucuguugagaagauu

SEQ ID NO: 40914 - RNA, 21 nt, RNAi
uuccuuguagacaacucuucu

SEQ ID NO: 40915 - DNA, 21 bp, homo sapiens
aaatgagatgttatccagtag

SEQ ID NO: 40916 - RNA, 21 nt, RNAi
augagauguuauccaguaguu

SEQ ID NO: 40917 - RNA, 21 nt, RNAi
uuuacucuacaauaggucauc

SEQ ID NO: 40918 - DNA, 21 bp, homo sapiens
aatgagatgttatccagtaga

SEQ ID NO: 40919 - RNA, 21 nt, RNAi
ugagauguuauccaguagauu

SEQ ID NO: 40920 - RNA, 21 nt, RNAi
uuacucuacaauaggucaucu

SEQ ID NO: 40921 - DNA, 21 bp, homo sapiens
aaacatgaagagacctgcaga

SEQ ID NO: 40922 - RNA, 21 nt, RNAi
acaugaagagaccugcagauu

SEQ ID NO: 40923 - RNA, 21 nt, RNAi
uuuguacuucucuggacgucu

SEQ ID NO: 40924 - DNA, 21 bp, homo sapiens
aacatgaagagacctgcagag

SEQ ID NO: 40925 - RNA, 21 nt, RNAi
caugaagagaccugcagaguu

SEQ ID NO: 40926 - RNA, 21 nt, RNAi
uuguacuucucuggacgucuc

SEQ ID NO: 40927 - DNA, 21 bp, homo sapiens
aagagacctgcagagagcaaa

SEQ ID NO: 40928 - RNA, 21 nt, RNAi
gagaccugcagagagcaaauu

SEQ ID NO: 40929 - RNA, 21 nt, RNAi
uucucuggacgucucucguuu

SEQ ID NO: 40930 - DNA, 21 bp, homo sapiens
aaaccttcaaatgaactaacc

SEQ ID NO: 40931 - RNA, 21 nt, RNAi
accuucaaaugaacuaaccuu

SEQ ID NO: 40932 - RNA, 21 nt, RNAi
uuuggaaguuuacuugauugg

SEQ ID NO: 40933 - DNA, 21 bp, homo sapiens
aaccttcaaatgaactaacca

SEQ ID NO: 40934 - RNA, 21 nt, RNAi
ccuucaaaugaacuaaccauu

SEQ ID NO: 40935 - RNA, 21 nt, RNAi
uuggaaguuuacuugauuggu

SEQ ID NO: 40936 - DNA, 21 bp, homo sapiens
aactaaccaattcaactgtag

SEQ ID NO: 40937 - RNA, 21 nt, RNAi
cuaaccaauucaacuguaguu

SEQ ID NO: 40938 - RNA, 21 nt, RNAi
uugauugguuaaguugacauc

SEQ ID NO: 40939 - DNA, 21 bp, homo sapiens
aactgtagtaattgacacaca

SEQ ID NO: 40940 - RNA, 21 nt, RNAi
cuguaguaauugacacacauu

SEQ ID NO: 40941 - RNA, 21 nt, RNAi
uugacaucauuaacugugugu

SEQ ID NO: 40942 - DNA, 21 bp, homo sapiens
aaggatagtaatcaaactccg

SEQ ID NO: 40943 - RNA, 21 nt, RNAi
ggauaguaaucaaacuccguu

SEQ ID NO: 40944 - RNA, 21 nt, RNAi
uuccuaucauuaguuugaggc

SEQ ID NO: 40945 - DNA, 21 bp, homo sapiens
aatcaaactccgcatttgtta

SEQ ID NO: 40946 - RNA, 21 nt, RNAi
ucaaacuccgcauuuguuauu

SEQ ID NO: 40947 - RNA, 21 nt, RNAi
uuaguuugaggcguaaacaau

SEQ ID NO: 40948 - DNA, 21 bp, homo sapiens
aaactccgcatttgttactaa

SEQ ID NO: 40949 - RNA, 21 nt, RNAi
acuccgcauuuguuacuaauu

SEQ ID NO: 40950 - RNA, 21 nt, RNAi
uuugaggcguaaacaaugauu

SEQ ID NO: 40951 - DNA, 21 bp, homo sapiens
aactccgcatttgttactaac

SEQ ID NO: 40952 - RNA, 21 nt, RNAi
cuccgcauuuguuacuaacuu

SEQ ID NO: 40953 - RNA, 21 nt, RNAi
uugaggcguaaacaaugauug

SEQ ID NO: 40954 - DNA, 21 bp, homo sapiens
aacatatgacattaagccagg

SEQ ID NO: 40955 - RNA, 21 nt, RNAi
cauaugacauuaagccagguu

SEQ ID NO: 40956 - RNA, 21 nt, RNAi
uuguauacuguaauucggucc

SEQ ID NO: 40957 - DNA, 21 bp, homo sapiens
aagccaggcatttcaccttaa

SEQ ID NO: 40958 - RNA, 21 nt, RNAi
gccaggcauuucaccuuaauu

SEQ ID NO: 40959 - RNA, 21 nt, RNAi
uucgguccguaaaguggaauu

SEQ ID NO: 40960 - DNA, 21 bp, homo sapiens
aaagcaagatgctaacatgcc

SEQ ID NO: 40961 - RNA, 21 nt, RNAi
agcaagaugcuaacaugccuu

SEQ ID NO: 40962 - RNA, 21 nt, RNAi
uuucguucuacgauuguacgg

SEQ ID NO: 40963 - DNA, 21 bp, homo sapiens
aagaaacctgtgcttggatct

SEQ ID NO: 40964 - RNA, 21 nt, RNAi
gaaaccugugcuuggaucuuu

SEQ ID NO: 40965 - RNA, 21 nt, RNAi
uucuuuggacacgaaccuaga

SEQ ID NO: 40966 - DNA, 21 bp, homo sapiens
aaacctgtgcttggatcttat

SEQ ID NO: 40967 - RNA, 21 nt, RNAi
accugugcuuggaucuuauuu

SEQ ID NO: 40968 - RNA, 21 nt, RNAi
uuuggacacgaaccuagaaua

SEQ ID NO: 40969 - DNA, 21 bp, homo sapiens
aacctgtgcttggatcttatc

SEQ ID NO: 40970 - RNA, 21 nt, RNAi
ccugugcuuggaucuuaucuu

SEQ ID NO: 40971 - RNA, 21 nt, RNAi
uuggacacgaaccuagaauag

SEQ ID NO: 40972 - DNA, 21 bp, homo sapiens
aaacctctacaagtcaaagat

SEQ ID NO: 40973 - RNA, 21 nt, RNAi
accucuacaagucaaagauuu

SEQ ID NO: 40974 - RNA, 21 nt, RNAi
uuuggagauguucaguuucua

SEQ ID NO: 40975 - DNA, 21 bp, homo sapiens
aacctctacaagtcaaagatg

SEQ ID NO: 40976 - RNA, 21 nt, RNAi
ccucuacaagucaaagauguu

SEQ ID NO: 40977 - RNA, 21 nt, RNAi
uuggagauguucaguuucuac

SEQ ID NO: 40978 - DNA, 21 bp, homo sapiens
aagtcaaagatgagagttctg

SEQ ID NO: 40979 - RNA, 21 nt, RNAi
gucaaagaugagaguucuguu

SEQ ID NO: 40980 - RNA, 21 nt, RNAi
uucaguuucuacucucaagac

SEQ ID NO: 40981 - DNA, 21 bp, homo sapiens
aaagatgagagttctgcagca

SEQ ID NO: 40982 - RNA, 21 nt, RNAi
agaugagaguucugcagcauu

SEQ ID NO: 40983 - RNA, 21 nt, RNAi
uuucuacucucaagacgucgu

SEQ ID NO: 40984 - DNA, 21 bp, homo sapiens
aagatgagagttctgcagcaa

SEQ ID NO: 40985 - RNA, 21 nt, RNAi
gaugagaguucugcagcaauu

SEQ ID NO: 40986 - RNA, 21 nt, RNAi
uucuacucucaagacgucguu

SEQ ID NO: 40987 - DNA, 21 bp, homo sapiens
aacaaagaaactttcagccac

SEQ ID NO: 40988 - RNA, 21 nt, RNAi
caaagaaacuuucagccacuu

SEQ ID NO: 40989 - RNA, 21 nt, RNAi
uuguuucuuugaaagucggug

SEQ ID NO: 40990 - DNA, 21 bp, homo sapiens
aaagaaactttcagccactat

SEQ ID NO: 40991 - RNA, 21 nt, RNAi
agaaacuuucagccacuauuu

SEQ ID NO: 40992 - RNA, 21 nt, RNAi
uuucuuugaaagucggugaua

SEQ ID NO: 40993 - DNA, 21 bp, homo sapiens
aagaaactttcagccactata

SEQ ID NO: 40994 - RNA, 21 nt, RNAi
gaaacuuucagccacuauauu

SEQ ID NO: 40995 - RNA, 21 nt, RNAi
uucuuugaaagucggugauau

SEQ ID NO: 40996 - DNA, 21 bp, homo sapiens
aaactttcagccactatacct

SEQ ID NO: 40997 - RNA, 21 nt, RNAi
acuuucagccacuauaccuuu

SEQ ID NO: 40998 - RNA, 21 nt, RNAi
uuugaaagucggugauaugga

SEQ ID NO: 40999 - DNA, 21 bp, homo sapiens
aactttcagccactataccta

SEQ ID NO: 41000 - RNA, 21 nt, RNAi
cuuucagccacuauaccuauu

SEQ ID NO: 41001 - RNA, 21 nt, RNAi
uugaaagucggugauauggau

SEQ ID NO: 41002 - DNA, 21 bp, homo sapiens
aaacctcagcctgtaaacacc

SEQ ID NO: 41003 - RNA, 21 nt, RNAi
accucagccuguaaacaccuu

SEQ ID NO: 41004 - RNA, 21 nt, RNAi
uuuggagucggacauuugugg

SEQ ID NO: 41005 - DNA, 21 bp, homo sapiens
aacctcagcctgtaaacacca

SEQ ID NO: 41006 - RNA, 21 nt, RNAi
ccucagccuguaaacaccauu

SEQ ID NO: 41007 - RNA, 21 nt, RNAi
uuggagucggacauuuguggu

SEQ ID NO: 41008 - DNA, 21 bp, homo sapiens
aaacaccagcagtgtaacagt

SEQ ID NO: 41009 - RNA, 21 nt, RNAi
acaccagcaguguaacaguuu

SEQ ID NO: 41010 - RNA, 21 nt, RNAi
uuuguggucgucacauuguca

SEQ ID NO: 41011 - DNA, 21 bp, homo sapiens
aacaccagcagtgtaacagtg

SEQ ID NO: 41012 - RNA, 21 nt, RNAi
caccagcaguguaacaguguu

SEQ ID NO: 41013 - RNA, 21 nt, RNAi
uuguggucgucacauugucac

SEQ ID NO: 41014 - DNA, 21 bp, homo sapiens
aatagatcctccaatatgact

SEQ ID NO: 41015 - RNA, 21 nt, RNAi
uagauccuccaauaugacuuu

SEQ ID NO: 41016 - RNA, 21 nt, RNAi
uuaucuaggagguuauacuga

SEQ ID NO: 41017 - DNA, 21 bp, homo sapiens
aatatgactgccactactaaa

SEQ ID NO: 41018 - RNA, 21 nt, RNAi
uaugacugccacuacuaaauu

SEQ ID NO: 41019 - RNA, 21 nt, RNAi
uuauacugacggugaugauuu

SEQ ID NO: 41020 - DNA, 21 bp, homo sapiens
aaatttgtgagcactacatct

SEQ ID NO: 41021 - RNA, 21 nt, RNAi
auuugugagcacuacaucuuu

SEQ ID NO: 41022 - RNA, 21 nt, RNAi
uuuaaacacucgugauguaga

SEQ ID NO: 41023 - DNA, 21 bp, homo sapiens
aatttgtgagcactacatctc

SEQ ID NO: 41024 - RNA, 21 nt, RNAi
uuugugagcacuacaucucuu

SEQ ID NO: 41025 - RNA, 21 nt, RNAi
uuaaacacucgugauguagag

SEQ ID NO: 41026 - DNA, 21 bp, homo sapiens
aacacacaacttgtgcgacct

SEQ ID NO: 41027 - RNA, 21 nt, RNAi
cacacaacuugugcgaccuuu

SEQ ID NO: 41028 - RNA, 21 nt, RNAi
uuguguguugaacacgcugga

SEQ ID NO: 41029 - DNA, 21 bp, homo sapiens
aacttgtgcgacctcctatta

SEQ ID NO: 41030 - RNA, 21 nt, RNAi
cuugugcgaccuccuauuauu

SEQ ID NO: 41031 - RNA, 21 nt, RNAi
uugaacacgcuggaggauaau

SEQ ID NO: 41032 - DNA, 21 bp, homo sapiens
aaacaaggcatcagtagaacc

SEQ ID NO: 41033 - RNA, 21 nt, RNAi
acaaggcaucaguagaaccuu

SEQ ID NO: 41034 - RNA, 21 nt, RNAi
uuuguuccguagucaucuugg

SEQ ID NO: 41035 - DNA, 21 bp, homo sapiens
aacaaggcatcagtagaacct

SEQ ID NO: 41036 - RNA, 21 nt, RNAi
caaggcaucaguagaaccuuu

SEQ ID NO: 41037 - RNA, 21 nt, RNAi
uuguuccguagucaucuugga

SEQ ID NO: 41038 - DNA, 21 bp, homo sapiens
aaggcatcagtagaacctctg

SEQ ID NO: 41039 - RNA, 21 nt, RNAi
ggcaucaguagaaccucuguu

SEQ ID NO: 41040 - RNA, 21 nt, RNAi
uuccguagucaucuuggagac

SEQ ID NO: 41041 - DNA, 21 bp, homo sapiens
aacctctgccaatgttacaat

SEQ ID NO: 41042 - RNA, 21 nt, RNAi
ccucugccaauguuacaauuu

SEQ ID NO: 41043 - RNA, 21 nt, RNAi
uuggagacgguuacaauguua

SEQ ID NO: 41044 - DNA, 21 bp, homo sapiens
aaacagctttatctagtgtca

SEQ ID NO: 41045 - RNA, 21 nt, RNAi
acagcuuuaucuagugucauu

SEQ ID NO: 41046 - RNA, 21 nt, RNAi
uuugucgaaauagaucacagu

SEQ ID NO: 41047 - DNA, 21 bp, homo sapiens
aacagctttatctagtgtcaa

SEQ ID NO: 41048 - RNA, 21 nt, RNAi
cagcuuuaucuagugucaauu

SEQ ID NO: 41049 - RNA, 21 nt, RNAi
uugucgaaauagaucacaguu

SEQ ID NO: 41050 - DNA, 21 bp, homo sapiens
aaaccagttcttctcaaggta

SEQ ID NO: 41051 - RNA, 21 nt, RNAi
accaguucuucucaagguauu

SEQ ID NO: 41052 - RNA, 21 nt, RNAi
uuuggucaagaagaguuccau

SEQ ID NO: 41053 - DNA, 21 bp, homo sapiens
aaccagttcttctcaaggtat

SEQ ID NO: 41054 - RNA, 21 nt, RNAi
ccaguucuucucaagguauuu

SEQ ID NO: 41055 - RNA, 21 nt, RNAi
uuggucaagaagaguuccaua

SEQ ID NO: 41056 - DNA, 21 bp, homo sapiens
aataagactctatcaagatcc

SEQ ID NO: 41057 - RNA, 21 nt, RNAi
uaagacucuaucaagauccuu

SEQ ID NO: 41058 - RNA, 21 nt, RNAi
uuauucugagauaguucuagg

SEQ ID NO: 41059 - DNA, 21 bp, homo sapiens
aagactctatcaagatccata

SEQ ID NO: 41060 - RNA, 21 nt, RNAi
gacucuaucaagauccauauu

SEQ ID NO: 41061 - RNA, 21 nt, RNAi
uucugagauaguucuagguau

SEQ ID NO: 41062 - DNA, 21 bp, homo sapiens
aagatccatagcatctgaagt

SEQ ID NO: 41063 - RNA, 21 nt, RNAi
gauccauagcaucugaaguuu

SEQ ID NO: 41064 - RNA, 21 nt, RNAi
uucuagguaucguagacuuca

SEQ ID NO: 41065 - DNA, 21 bp, homo sapiens
aagttgtagccaggcctgctt

SEQ ID NO: 41066 - RNA, 21 nt, RNAi
guuguagccaggccugcuuuu

SEQ ID NO: 41067 - RNA, 21 nt, RNAi
uucaacaucgguccggacgaa

SEQ ID NO: 41068 - DNA, 21 bp, homo sapiens
aattgttgatagtagatcagc

SEQ ID NO: 41069 - RNA, 21 nt, RNAi
uuguugauaguagaucagcuu

SEQ ID NO: 41070 - RNA, 21 nt, RNAi
uuaacaacuaucaucuagucg

SEQ ID NO: 41071 - DNA, 21 bp, homo sapiens
aaagaaacctcggaagagaga

SEQ ID NO: 41072 - RNA, 21 nt, RNAi
agaaaccucggaagagagauu

SEQ ID NO: 41073 - RNA, 21 nt, RNAi
uuucuuuggagccuucucucu

SEQ ID NO: 41074 - DNA, 21 bp, homo sapiens
aagaaacctcggaagagagaa

SEQ ID NO: 41075 - RNA, 21 nt, RNAi
gaaaccucggaagagagaauu

SEQ ID NO: 41076 - RNA, 21 nt, RNAi
uucuuuggagccuucucucuu

SEQ ID NO: 41077 - DNA, 21 bp, homo sapiens
aaagctcgtctgagtgagtgg

SEQ ID NO: 41078 - RNA, 21 nt, RNAi
agcucgucugagugagugguu

SEQ ID NO: 41079 - RNA, 21 nt, RNAi
uuucgagcagacucacucacc

SEQ ID NO: 41080 - DNA, 21 bp, homo sapiens
aagctcgtctgagtgagtgga

SEQ ID NO: 41081 - RNA, 21 nt, RNAi
gcucgucugagugaguggauu

SEQ ID NO: 41082 - RNA, 21 nt, RNAi
uucgagcagacucacucaccu

SEQ ID NO: 41083 - DNA, 21 bp, homo sapiens
aaagctggcaaaggaagagtg

SEQ ID NO: 41084 - RNA, 21 nt, RNAi
agcuggcaaaggaagaguguu

SEQ ID NO: 41085 - RNA, 21 nt, RNAi
uuucgaccguuuccuucucac

SEQ ID NO: 41086 - DNA, 21 bp, homo sapiens
aagctggcaaaggaagagtgc

SEQ ID NO: 41087 - RNA, 21 nt, RNAi
gcuggcaaaggaagagugcuu

SEQ ID NO: 41088 - RNA, 21 nt, RNAi
uucgaccguuuccuucucacg

SEQ ID NO: 41089 - DNA, 21 bp, homo sapiens
aattcagtagttactcagcat

SEQ ID NO: 41090 - RNA, 21 nt, RNAi
uucaguaguuacucagcauuu

SEQ ID NO: 41091 - RNA, 21 nt, RNAi
uuaagucaucaaugagucgua

SEQ ID NO: 41092 - DNA, 21 bp, homo sapiens
aatgcctgaacttgattaatg

SEQ ID NO: 41093 - RNA, 21 nt, RNAi
ugccugaacuugauuaauguu

SEQ ID NO: 41094 - RNA, 21 nt, RNAi
uuacggacuugaacuaauuac

SEQ ID NO: 41095 - DNA, 21 bp, homo sapiens
aaagaagatatactggtcaca

SEQ ID NO: 41096 - RNA, 21 nt, RNAi
agaagauauacuggucacauu

SEQ ID NO: 41097 - RNA, 21 nt, RNAi
uuucuucuauaugaccagugu

SEQ ID NO: 41098 - DNA, 21 bp, homo sapiens
aagaagatatactggtcacac

SEQ ID NO: 41099 - RNA, 21 nt, RNAi
gaagauauacuggucacacuu

SEQ ID NO: 41100 - RNA, 21 nt, RNAi
uucuucuauaugaccagugug

SEQ ID NO: 41101 - DNA, 21 bp, homo sapiens
aagatatactggtcacactga

SEQ ID NO: 41102 - RNA, 21 nt, RNAi
gauauacuggucacacugauu

SEQ ID NO: 41103 - RNA, 21 nt, RNAi
uucuauaugaccagugugacu

SEQ ID NO: 41104 - DNA, 21 bp, homo sapiens
aagtattggatatgtcttgca

SEQ ID NO: 41105 - RNA, 21 nt, RNAi
guauuggauaugucuugcauu

SEQ ID NO: 41106 - RNA, 21 nt, RNAi
uucauaaccuauacagaacgu

SEQ ID NO: 41107 - DNA, 21 bp, homo sapiens
aaccaatcacaagtcctattg

SEQ ID NO: 41108 - RNA, 21 nt, RNAi
ccaaucacaaguccuauuguu

SEQ ID NO: 41109 - RNA, 21 nt, RNAi
uugguuaguguucaggauaac

SEQ ID NO: 41110 - DNA, 21 bp, homo sapiens
aatctatgagaaagccattct

SEQ ID NO: 41111 - RNA, 21 nt, RNAi
ucuaugagaaagccauucuuu

SEQ ID NO: 41112 - RNA, 21 nt, RNAi
uuagauacucuuucgguaaga

SEQ ID NO: 41113 - DNA, 21 bp, homo sapiens
aagagatgcgacacacgattg

SEQ ID NO: 41114 - RNA, 21 nt, RNAi
gagaugcgacacacgauuguu

SEQ ID NO: 41115 - RNA, 21 nt, RNAi
uucucuacgcugugugcuaac

SEQ ID NO: 41116 - DNA, 21 bp, homo sapiens
aaatatggagaagtcttgtgc

SEQ ID NO: 41117 - RNA, 21 nt, RNAi
auauggagaagucuugugcuu

SEQ ID NO: 41118 - RNA, 21 nt, RNAi
uuuauaccucuucagaacacg

SEQ ID NO: 41119 - DNA, 21 bp, homo sapiens
aatatggagaagtcttgtgca

SEQ ID NO: 41120 - RNA, 21 nt, RNAi
uauggagaagucuugugcauu

SEQ ID NO: 41121 - RNA, 21 nt, RNAi
uuauaccucuucagaacacgu

SEQ ID NO: 41122 - DNA, 21 bp, homo sapiens
aagtcttgtgcaagcaaggaa

SEQ ID NO: 41123 - RNA, 21 nt, RNAi
gucuugugcaagcaaggaauu

SEQ ID NO: 41124 - RNA, 21 nt, RNAi
uucagaacacguucguuccuu

SEQ ID NO: 41125 - DNA, 21 bp, homo sapiens
aagcaaggaagaagtcagaga

SEQ ID NO: 41126 - RNA, 21 nt, RNAi
gcaaggaagaagucagagauu

SEQ ID NO: 41127 - RNA, 21 nt, RNAi
uucguuccuucuucagucucu

SEQ ID NO: 41128 - DNA, 21 bp, homo sapiens
aaggaagaagtcagagaagtc

SEQ ID NO: 41129 - RNA, 21 nt, RNAi
ggaagaagucagagaagucuu

SEQ ID NO: 41130 - RNA, 21 nt, RNAi
uuccuucuucagucucuucag

SEQ ID NO: 41131 - DNA, 21 bp, homo sapiens
aagaagtcagagaagtcagta

SEQ ID NO: 41132 - RNA, 21 nt, RNAi
gaagucagagaagucaguauu

SEQ ID NO: 41133 - RNA, 21 nt, RNAi
uucuucagucucuucagucau

SEQ ID NO: 41134 - DNA, 21 bp, homo sapiens
aagtcagagaagtcagtattg

SEQ ID NO: 41135 - RNA, 21 nt, RNAi
gucagagaagucaguauuguu

SEQ ID NO: 41136 - RNA, 21 nt, RNAi
uucagucucuucagucauaac

SEQ ID NO: 41137 - DNA, 21 bp, homo sapiens
aagtcagtattgaagatacag

SEQ ID NO: 41138 - RNA, 21 nt, RNAi
gucaguauugaagauacaguu

SEQ ID NO: 41139 - RNA, 21 nt, RNAi
uucagucauaacuucuauguc

SEQ ID NO: 41140 - DNA, 21 bp, homo sapiens
aagatacaggtgttgatgtag

SEQ ID NO: 41141 - RNA, 21 nt, RNAi
gauacagguguugauguaguu

SEQ ID NO: 41142 - RNA, 21 nt, RNAi
uucuauguccacaacuacauc

SEQ ID NO: 41143 - DNA, 21 bp, homo sapiens
aaactggaaatggagagtaaa

SEQ ID NO: 41144 - RNA, 21 nt, RNAi
acuggaaauggagaguaaauu

SEQ ID NO: 41145 - RNA, 21 nt, RNAi
uuugaccuuuaccucucauuu

SEQ ID NO: 41146 - DNA, 21 bp, homo sapiens
aactggaaatggagagtaaac

SEQ ID NO: 41147 - RNA, 21 nt, RNAi
cuggaaauggagaguaaacuu

SEQ ID NO: 41148 - RNA, 21 nt, RNAi
uugaccuuuaccucucauuug

SEQ ID NO: 41149 - DNA, 21 bp, homo sapiens
aatggagagtaaacttcatag

SEQ ID NO: 41150 - RNA, 21 nt, RNAi
uggagaguaaacuucauaguu

SEQ ID NO: 41151 - RNA, 21 nt, RNAi
uuaccucucauuugaaguauc

SEQ ID NO: 41152 - DNA, 21 bp, homo sapiens
aatacagaaacgaggacaagt

SEQ ID NO: 41153 - RNA, 21 nt, RNAi
uacagaaacgaggacaaguuu

SEQ ID NO: 41154 - RNA, 21 nt, RNAi
uuaugucuuugcuccuguuca

SEQ ID NO: 41155 - DNA, 21 bp, homo sapiens
aaacgaggacaagttgcttaa

SEQ ID NO: 41156 - RNA, 21 nt, RNAi
acgaggacaaguugcuuaauu

SEQ ID NO: 41157 - RNA, 21 nt, RNAi
uuugcuccuguucaacgaauu

SEQ ID NO: 41158 - DNA, 21 bp, homo sapiens
aacgaggacaagttgcttaat

SEQ ID NO: 41159 - RNA, 21 nt, RNAi
cgaggacaaguugcuuaauuu

SEQ ID NO: 41160 - RNA, 21 nt, RNAi
uugcuccuguucaacgaauua

SEQ ID NO: 41161 - DNA, 21 bp, homo sapiens
aatataatgtgtctactacgc

SEQ ID NO: 41162 - RNA, 21 nt, RNAi
uauaaugugucuacuacgcuu

SEQ ID NO: 41163 - RNA, 21 nt, RNAi
uuauauuacacagaugaugcg

SEQ ID NO: 41164 - DNA, 21 bp, homo sapiens
aatgtgtctactacgccatac

SEQ ID NO: 41165 - RNA, 21 nt, RNAi
ugugucuacuacgccauacuu

SEQ ID NO: 41166 - RNA, 21 nt, RNAi
uuacacagaugaugcgguaug

SEQ ID NO: 41167 - DNA, 21 bp, homo sapiens
aaaggtgcagtttgatggaac

SEQ ID NO: 41168 - RNA, 21 nt, RNAi
aggugcaguuugauggaacuu

SEQ ID NO: 41169 - RNA, 21 nt, RNAi
uuuccacgucaaacuaccuug

SEQ ID NO: 41170 - DNA, 21 bp, homo sapiens
aaggtgcagtttgatggaaca

SEQ ID NO: 41171 - RNA, 21 nt, RNAi
ggugcaguuugauggaacauu

SEQ ID NO: 41172 - RNA, 21 nt, RNAi
uuccacgucaaacuaccuugu

SEQ ID NO: 41173 - DNA, 21 bp, homo sapiens
aaattccgcatttaaagagct

SEQ ID NO: 41174 - RNA, 21 nt, RNAi
auuccgcauuuaaagagcuuu

SEQ ID NO: 41175 - RNA, 21 nt, RNAi
uuuaaggcguaaauuucucga

SEQ ID NO: 41176 - DNA, 21 bp, homo sapiens
aattccgcatttaaagagctg

SEQ ID NO: 41177 - RNA, 21 nt, RNAi
uuccgcauuuaaagagcuguu

SEQ ID NO: 41178 - RNA, 21 nt, RNAi
uuaaggcguaaauuucucgac

SEQ ID NO: 41179 - DNA, 21 bp, homo sapiens
aacaccagtgagacgttctcg

SEQ ID NO: 41180 - RNA, 21 nt, RNAi
caccagugagacguucucguu

SEQ ID NO: 41181 - RNA, 21 nt, RNAi
uuguggucacucugcaagagc

SEQ ID NO: 41182 - DNA, 21 bp, homo sapiens
aaagatcattatccttgtgtg

SEQ ID NO: 41183 - RNA, 21 nt, RNAi
agaucauuauccuuguguguu

SEQ ID NO: 41184 - RNA, 21 nt, RNAi
uuucuaguaauaggaacacac

SEQ ID NO: 41185 - DNA, 21 bp, homo sapiens
aagatcattatccttgtgtgt

SEQ ID NO: 41186 - RNA, 21 nt, RNAi
gaucauuauccuuguguguuu

SEQ ID NO: 41187 - RNA, 21 nt, RNAi
uucuaguaauaggaacacaca

SEQ ID NO: 41188 - DNA, 21 bp, homo sapiens
aagcattcacggcagtgagct

SEQ ID NO: 41189 - RNA, 21 nt, RNAi
gcauucacggcagugagcuuu

SEQ ID NO: 41190 - RNA, 21 nt, RNAi
uucguaagugccgucacucga

SEQ ID NO: 41191 - DNA, 21 bp, homo sapiens
aacattcatgttatggcaaga

SEQ ID NO: 41192 - RNA, 21 nt, RNAi
cauucauguuauggcaagauu

SEQ ID NO: 41193 - RNA, 21 nt, RNAi
uuguaaguacaauaccguucu

SEQ ID NO: 41194 - DNA, 21 bp, homo sapiens
aagagttgtcctctacattgg

SEQ ID NO: 41195 - RNA, 21 nt, RNAi
gaguuguccucuacauugguu

SEQ ID NO: 41196 - RNA, 21 nt, RNAi
uucucaacaggagauguaacc

SEQ ID NO: 41197 - DNA, 21 bp, homo sapiens
aaagctaatcctaccttgtca

SEQ ID NO: 41198 - RNA, 21 nt, RNAi
agcuaauccuaccuugucauu

SEQ ID NO: 41199 - RNA, 21 nt, RNAi
uuucgauuaggauggaacagu

SEQ ID NO: 41200 - DNA, 21 bp, homo sapiens
aagctaatcctaccttgtcag

SEQ ID NO: 41201 - RNA, 21 nt, RNAi
gcuaauccuaccuugucaguu

SEQ ID NO: 41202 - RNA, 21 nt, RNAi
uucgauuaggauggaacaguc

SEQ ID NO: 41203 - DNA, 21 bp, homo sapiens
aatcctaccttgtcagtttca

SEQ ID NO: 41204 - RNA, 21 nt, RNAi
uccuaccuugucaguuucauu

SEQ ID NO: 41205 - RNA, 21 nt, RNAi
uuaggauggaacagucaaagu

SEQ ID NO: 41206 - DNA, 21 bp, homo sapiens
aaatgtatgtttgccttgaca

SEQ ID NO: 41207 - RNA, 21 nt, RNAi
auguauguuugccuugacauu

SEQ ID NO: 41208 - RNA, 21 nt, RNAi
uuuacauacaaacggaacugu

SEQ ID NO: 41209 - DNA, 21 bp, homo sapiens
aatgtatgtttgccttgacat

SEQ ID NO: 41210 - RNA, 21 nt, RNAi
uguauguuugccuugacauuu

SEQ ID NO: 41211 - RNA, 21 nt, RNAi
uuacauacaaacggaacugua

SEQ ID NO: 41212 - DNA, 21 bp, homo sapiens
aatgactcacttcgaatacta

SEQ ID NO: 41213 - RNA, 21 nt, RNAi
ugacucacuucgaauacuauu

SEQ ID NO: 41214 - RNA, 21 nt, RNAi
uuacugagugaagcuuaugau

SEQ ID NO: 41215 - DNA, 21 bp, homo sapiens
aatactaagacacaggaggtt

SEQ ID NO: 41216 - RNA, 21 nt, RNAi
uacuaagacacaggagguuuu

SEQ ID NO: 41217 - RNA, 21 nt, RNAi
uuaugauucuguguccuccaa

SEQ ID NO: 41218 - DNA, 21 bp, homo sapiens
aagacacaggaggtttagcct

SEQ ID NO: 41219 - RNA, 21 nt, RNAi
gacacaggagguuuagccuuu

SEQ ID NO: 41220 - RNA, 21 nt, RNAi
uucuguguccuccaaaucgga

SEQ ID NO: 41221 - DNA, 21 bp, homo sapiens
aaagtgtctgcactgacactt

SEQ ID NO: 41222 - RNA, 21 nt, RNAi
agugucugcacugacacuuuu

SEQ ID NO: 41223 - RNA, 21 nt, RNAi
uuucacagacgugacugugaa

SEQ ID NO: 41224 - DNA, 21 bp, homo sapiens
aagtgtctgcactgacacttt

SEQ ID NO: 41225 - RNA, 21 nt, RNAi
gugucugcacugacacuuuuu

SEQ ID NO: 41226 - RNA, 21 nt, RNAi
uucacagacgugacugugaaa

SEQ ID NO: 41227 - DNA, 21 bp, homo sapiens
aaataccgcatttctaagaga

SEQ ID NO: 41228 - RNA, 21 nt, RNAi
auaccgcauuucuaagagauu

SEQ ID NO: 41229 - RNA, 21 nt, RNAi
uuuauggcguaaagauucucu

SEQ ID NO: 41230 - DNA, 21 bp, homo sapiens
aataccgcatttctaagagaa

SEQ ID NO: 41231 - RNA, 21 nt, RNAi
uaccgcauuucuaagagaauu

SEQ ID NO: 41232 - RNA, 21 nt, RNAi
uuauggcguaaagauucucuu

SEQ ID NO: 41233 - DNA, 21 bp, homo sapiens
aaagatgccacatttagtggt

SEQ ID NO: 41234 - RNA, 21 nt, RNAi
agaugccacauuuagugguuu

SEQ ID NO: 41235 - RNA, 21 nt, RNAi
uuucuacgguguaaaucacca

SEQ ID NO: 41236 - DNA, 21 bp, homo sapiens
aagatgccacatttagtggtt

SEQ ID NO: 41237 - RNA, 21 nt, RNAi
gaugccacauuuagugguuuu

SEQ ID NO: 41238 - RNA, 21 nt, RNAi
uucuacgguguaaaucaccaa

SEQ ID NO: 41239 - DNA, 21 bp, homo sapiens
aagcaattagaatggagttag

SEQ ID NO: 41240 - RNA, 21 nt, RNAi
gcaauuagaauggaguuaguu

SEQ ID NO: 41241 - RNA, 21 nt, RNAi
uucguuaaucuuaccucaauc

SEQ ID NO: 41242 - DNA, 21 bp, homo sapiens
aaacttcactgttaagtcatg

SEQ ID NO: 41243 - RNA, 21 nt, RNAi
acuucacuguuaagucauguu

SEQ ID NO: 41244 - RNA, 21 nt, RNAi
uuugaagugacaauucaguac

SEQ ID NO: 41245 - DNA, 21 bp, homo sapiens
aacttcactgttaagtcatgt

SEQ ID NO: 41246 - RNA, 21 nt, RNAi
cuucacuguuaagucauguuu

SEQ ID NO: 41247 - RNA, 21 nt, RNAi
uugaagugacaauucaguaca

SEQ ID NO: 41248 - DNA, 21 bp, homo sapiens
aaggttccaaactaatatggc

SEQ ID NO: 41249 - RNA, 21 nt, RNAi
gguuccaaacuaauauggcuu

SEQ ID NO: 41250 - RNA, 21 nt, RNAi
uuccaagguuugauuauaccg

SEQ ID NO: 41251 - DNA, 21 bp, homo sapiens
aactgtatgaatgtgaagatc

SEQ ID NO: 41252 - RNA, 21 nt, RNAi
cuguaugaaugugaagaucuu

SEQ ID NO: 41253 - RNA, 21 nt, RNAi
uugacauacuuacacuucuag

SEQ ID NO: 41254 - DNA, 21 bp, homo sapiens
aatgtgaagatcacatgctta

SEQ ID NO: 41255 - RNA, 21 nt, RNAi
ugugaagaucacaugcuuauu

SEQ ID NO: 41256 - RNA, 21 nt, RNAi
uuacacuucuaguguacgaau

SEQ ID NO: 41257 - DNA, 21 bp, homo sapiens
aagatcacatgcttagtcatt

SEQ ID NO: 41258 - RNA, 21 nt, RNAi
gaucacaugcuuagucauuuu

SEQ ID NO: 41259 - RNA, 21 nt, RNAi
uucuaguguacgaaucaguaa

SEQ ID NO: 41260 - DNA, 21 bp, homo sapiens
aaatgcagtttaaccacagtg

SEQ ID NO: 41261 - RNA, 21 nt, RNAi
augcaguuuaaccacaguguu

SEQ ID NO: 41262 - RNA, 21 nt, RNAi
uuuacgucaaauuggugucac

SEQ ID NO: 41263 - DNA, 21 bp, homo sapiens
aatgcagtttaaccacagtga

SEQ ID NO: 41264 - RNA, 21 nt, RNAi
ugcaguuuaaccacagugauu

SEQ ID NO: 41265 - RNA, 21 nt, RNAi
uuacgucaaauuggugucacu

SEQ ID NO: 41266 - DNA, 21 bp, homo sapiens
aaagtcatcagtctacttaca

SEQ ID NO: 41267 - RNA, 21 nt, RNAi
agucaucagucuacuuacauu

SEQ ID NO: 41268 - RNA, 21 nt, RNAi
uuucaguagucagaugaaugu

SEQ ID NO: 41269 - DNA, 21 bp, homo sapiens
aagtcatcagtctacttacat

SEQ ID NO: 41270 - RNA, 21 nt, RNAi
gucaucagucuacuuacauuu

SEQ ID NO: 41271 - RNA, 21 nt, RNAi
uucaguagucagaugaaugua

SEQ ID NO: 41272 - DNA, 21 bp, homo sapiens
cagtccgcattcaaagagcaa

SEQ ID NO: 41273 - RNA, 21 nt, RNAi
guccgcauucaaagagcaauu

SEQ ID NO: 41274 - RNA, 21 nt, RNAi
uucaggcguaaguuucucguu

SEQ ID NO: 41275 - DNA, 21 bp, homo sapiens
cattcaaagagcaaagaagac

SEQ ID NO: 41276 - RNA, 21 nt, RNAi
uucaaagagcaaagaagacuu

SEQ ID NO: 41277 - RNA, 21 nt, RNAi
uuaaguuucucguuucuucug

SEQ ID NO: 41278 - DNA, 21 bp, homo sapiens
caaggaacatctgttgagaag

SEQ ID NO: 41279 - RNA, 21 nt, RNAi
aggaacaucuguugagaaguu

SEQ ID NO: 41280 - RNA, 21 nt, RNAi
uuuccuuguagacaacucuuc

SEQ ID NO: 41281 - DNA, 21 bp, homo sapiens
cagtagagatcagagagttgt

SEQ ID NO: 41282 - RNA, 21 nt, RNAi
guagagaucagagaguuguuu

SEQ ID NO: 41283 - RNA, 21 nt, RNAi
uucaucucuagucucucaaca

SEQ ID NO: 41284 - DNA, 21 bp, homo sapiens
cagagagttgtgacatctgag

SEQ ID NO: 41285 - RNA, 21 nt, RNAi
gagaguugugacaucugaguu

SEQ ID NO: 41286 - RNA, 21 nt, RNAi
uucucucaacacuguagacuc

SEQ ID NO: 41287 - DNA, 21 bp, homo sapiens
catctgaggaccaagttcaag

SEQ ID NO: 41288 - RNA, 21 nt, RNAi
ucugaggaccaaguucaaguu

SEQ ID NO: 41289 - RNA, 21 nt, RNAi
uuagacuccugguucaaguuc

SEQ ID NO: 41290 - DNA, 21 bp, homo sapiens
catgaagagacctgcagagag

SEQ ID NO: 41291 - RNA, 21 nt, RNAi
ugaagagaccugcagagaguu

SEQ ID NO: 41292 - RNA, 21 nt, RNAi
uuacuucucuggacgucucuc

SEQ ID NO: 41293 - DNA, 21 bp, homo sapiens
caactgtagtaattgacacac

SEQ ID NO: 41294 - RNA, 21 nt, RNAi
acuguaguaauugacacacuu

SEQ ID NO: 41295 - RNA, 21 nt, RNAi
uuugacaucauuaacugugug

SEQ ID NO: 41296 - DNA, 21 bp, homo sapiens
cacacataaacctaaggatag

SEQ ID NO: 41297 - RNA, 21 nt, RNAi
cacauaaaccuaaggauaguu

SEQ ID NO: 41298 - RNA, 21 nt, RNAi
uuguguauuuggauuccuauc

SEQ ID NO: 41299 - DNA, 21 bp, homo sapiens
cacataaacctaaggatagta

SEQ ID NO: 41300 - RNA, 21 nt, RNAi
cauaaaccuaaggauaguauu

SEQ ID NO: 41301 - RNA, 21 nt, RNAi
uuguauuuggauuccuaucau

SEQ ID NO: 41302 - DNA, 21 bp, homo sapiens
caaactccgcatttgttacta

SEQ ID NO: 41303 - RNA, 21 nt, RNAi
aacuccgcauuuguuacuauu

SEQ ID NO: 41304 - RNA, 21 nt, RNAi
uuuugaggcguaaacaaugau

SEQ ID NO: 41305 - DNA, 21 bp, homo sapiens
caacatatgacattaagccag

SEQ ID NO: 41306 - RNA, 21 nt, RNAi
acauaugacauuaagccaguu

SEQ ID NO: 41307 - RNA, 21 nt, RNAi
uuuguauacuguaauucgguc

SEQ ID NO: 41308 - DNA, 21 bp, homo sapiens
catatgacattaagccaggca

SEQ ID NO: 41309 - RNA, 21 nt, RNAi
uaugacauuaagccaggcauu

SEQ ID NO: 41310 - RNA, 21 nt, RNAi
uuauacuguaauucgguccgu

SEQ ID NO: 41311 - DNA, 21 bp, homo sapiens
cattaagccaggcatttcacc

SEQ ID NO: 41312 - RNA, 21 nt, RNAi
uuaagccaggcauuucaccuu

SEQ ID NO: 41313 - RNA, 21 nt, RNAi
uuaauucgguccguaaagugg

SEQ ID NO: 41314 - DNA, 21 bp, homo sapiens
caagaaacctgtgcttggatc

SEQ ID NO: 41315 - RNA, 21 nt, RNAi
agaaaccugugcuuggaucuu

SEQ ID NO: 41316 - RNA, 21 nt, RNAi
uuucuuuggacacgaaccuag

SEQ ID NO: 41317 - DNA, 21 bp, homo sapiens
cagattgttcagtctaagatt

SEQ ID NO: 41318 - RNA, 21 nt, RNAi
gauuguucagucuaagauuuu

SEQ ID NO: 41319 - RNA, 21 nt, RNAi
uucuaacaagucagauucuaa

SEQ ID NO: 41320 - DNA, 21 bp, homo sapiens
caagtcaaagatgagagttct

SEQ ID NO: 41321 - RNA, 21 nt, RNAi
agucaaagaugagaguucuuu

SEQ ID NO: 41322 - RNA, 21 nt, RNAi
uuucaguuucuacucucaaga

SEQ ID NO: 41323 - DNA, 21 bp, homo sapiens
caaagatgagagttctgcagc

SEQ ID NO: 41324 - RNA, 21 nt, RNAi
aagaugagaguucugcagcuu

SEQ ID NO: 41325 - RNA, 21 nt, RNAi
uuuucuacucucaagacgucg

SEQ ID NO: 41326 - DNA, 21 bp, homo sapiens
cagcaacaaagaaactttcag

SEQ ID NO: 41327 - RNA, 21 nt, RNAi
gcaacaaagaaacuuucaguu

SEQ ID NO: 41328 - RNA, 21 nt, RNAi
uucguuguuucuuugaaaguc

SEQ ID NO: 41329 - DNA, 21 bp, homo sapiens
caacaaagaaactttcagcca

SEQ ID NO: 41330 - RNA, 21 nt, RNAi
acaaagaaacuuucagccauu

SEQ ID NO: 41331 - RNA, 21 nt, RNAi
uuuguuucuuugaaagucggu

SEQ ID NO: 41332 - DNA, 21 bp, homo sapiens
caaagaaactttcagccacta

SEQ ID NO: 41333 - RNA, 21 nt, RNAi
aagaaacuuucagccacuauu

SEQ ID NO: 41334 - RNA, 21 nt, RNAi
uuuucuuugaaagucggugau

SEQ ID NO: 41335 - DNA, 21 bp, homo sapiens
cagccactatacctaaagcca

SEQ ID NO: 41336 - RNA, 21 nt, RNAi
gccacuauaccuaaagccauu

SEQ ID NO: 41337 - RNA, 21 nt, RNAi
uucggugauauggauuucggu

SEQ ID NO: 41338 - DNA, 21 bp, homo sapiens
cactatacctaaagccacaaa

SEQ ID NO: 41339 - RNA, 21 nt, RNAi
cuauaccuaaagccacaaauu

SEQ ID NO: 41340 - RNA, 21 nt, RNAi
uugauauggauuucgguguuu

SEQ ID NO: 41341 - DNA, 21 bp, homo sapiens
cagcctgtaaacaccagcagt

SEQ ID NO: 41342 - RNA, 21 nt, RNAi
gccuguaaacaccagcaguuu

SEQ ID NO: 41343 - RNA, 21 nt, RNAi
uucggacauuuguggucguca

SEQ ID NO: 41344 - DNA, 21 bp, homo sapiens
caccagcagtgtaacagtgaa

SEQ ID NO: 41345 - RNA, 21 nt, RNAi
ccagcaguguaacagugaauu

SEQ ID NO: 41346 - RNA, 21 nt, RNAi
uuggucgucacauugucacuu

SEQ ID NO: 41347 - DNA, 21 bp, homo sapiens
caatatgactgccactactaa

SEQ ID NO: 41348 - RNA, 21 nt, RNAi
auaugacugccacuacuaauu

SEQ ID NO: 41349 - RNA, 21 nt, RNAi
uuuauacugacggugaugauu

SEQ ID NO: 41350 - DNA, 21 bp, homo sapiens
cactactaaatttgtgagcac

SEQ ID NO: 41351 - RNA, 21 nt, RNAi
cuacuaaauuugugagcacuu

SEQ ID NO: 41352 - RNA, 21 nt, RNAi
uugaugauuuaaacacucgug

SEQ ID NO: 41353 - DNA, 21 bp, homo sapiens
cactacatctcagaacacaca

SEQ ID NO: 41354 - RNA, 21 nt, RNAi
cuacaucucagaacacacauu

SEQ ID NO: 41355 - RNA, 21 nt, RNAi
uugauguagagucuugugugu

SEQ ID NO: 41356 - DNA, 21 bp, homo sapiens
catctcagaacacacaacttg

SEQ ID NO: 41357 - RNA, 21 nt, RNAi
ucucagaacacacaacuuguu

SEQ ID NO: 41358 - RNA, 21 nt, RNAi
uuagagucuuguguguugaac

SEQ ID NO: 41359 - DNA, 21 bp, homo sapiens
cagaacacacaacttgtgcga

SEQ ID NO: 41360 - RNA, 21 nt, RNAi
gaacacacaacuugugcgauu

SEQ ID NO: 41361 - RNA, 21 nt, RNAi
uucuuguguguugaacacgcu

SEQ ID NO: 41362 - DNA, 21 bp, homo sapiens
cacacaacttgtgcgacctcc

SEQ ID NO: 41363 - RNA, 21 nt, RNAi
cacaacuugugcgaccuccuu

SEQ ID NO: 41364 - RNA, 21 nt, RNAi
uuguguugaacacgcuggagg

SEQ ID NO: 41365 - DNA, 21 bp, homo sapiens
cacaacttgtgcgacctccta

SEQ ID NO: 41366 - RNA, 21 nt, RNAi
caacuugugcgaccuccuauu

SEQ ID NO: 41367 - RNA, 21 nt, RNAi
uuguugaacacgcuggaggau

SEQ ID NO: 41368 - DNA, 21 bp, homo sapiens
caacttgtgcgacctcctatt

SEQ ID NO: 41369 - RNA, 21 nt, RNAi
acuugugcgaccuccuauuuu

SEQ ID NO: 41370 - RNA, 21 nt, RNAi
uuugaacacgcuggaggauaa

SEQ ID NO: 41371 - DNA, 21 bp, homo sapiens
cactgtgaaacaaggcatcag

SEQ ID NO: 41372 - RNA, 21 nt, RNAi
cugugaaacaaggcaucaguu

SEQ ID NO: 41373 - RNA, 21 nt, RNAi
uugacacuuuguuccguaguc

SEQ ID NO: 41374 - DNA, 21 bp, homo sapiens
caaggcatcagtagaacctct

SEQ ID NO: 41375 - RNA, 21 nt, RNAi
aggcaucaguagaaccucuuu

SEQ ID NO: 41376 - RNA, 21 nt, RNAi
uuuccguagucaucuuggaga

SEQ ID NO: 41377 - DNA, 21 bp, homo sapiens
catcagtagaacctctgccaa

SEQ ID NO: 41378 - RNA, 21 nt, RNAi
ucaguagaaccucugccaauu

SEQ ID NO: 41379 - RNA, 21 nt, RNAi
uuagucaucuuggagacgguu

SEQ ID NO: 41380 - DNA, 21 bp, homo sapiens
cagtagaacctctgccaatgt

SEQ ID NO: 41381 - RNA, 21 nt, RNAi
guagaaccucugccaauguuu

SEQ ID NO: 41382 - RNA, 21 nt, RNAi
uucaucuuggagacgguuaca

SEQ ID NO: 41383 - DNA, 21 bp, homo sapiens
caatgttacaatccggaaagg

SEQ ID NO: 41384 - RNA, 21 nt, RNAi
auguuacaauccggaaagguu

SEQ ID NO: 41385 - RNA, 21 nt, RNAi
uuuacaauguuaggccuuucc

SEQ ID NO: 41386 - DNA, 21 bp, homo sapiens
cagttcttctcaaggtataat

SEQ ID NO: 41387 - RNA, 21 nt, RNAi
guucuucucaagguauaauuu

SEQ ID NO: 41388 - RNA, 21 nt, RNAi
uucaagaagaguuccauauua

SEQ ID NO: 41389 - DNA, 21 bp, homo sapiens
caagatccatagcatctgaag

SEQ ID NO: 41390 - RNA, 21 nt, RNAi
agauccauagcaucugaaguu

SEQ ID NO: 41391 - RNA, 21 nt, RNAi
uuucuagguaucguagacuuc

SEQ ID NO: 41392 - DNA, 21 bp, homo sapiens
catagcatctgaagttgtagc

SEQ ID NO: 41393 - RNA, 21 nt, RNAi
uagcaucugaaguuguagcuu

SEQ ID NO: 41394 - RNA, 21 nt, RNAi
uuaucguagacuucaacaucg

SEQ ID NO: 41395 - DNA, 21 bp, homo sapiens
catctgaagttgtagccaggc

SEQ ID NO: 41396 - RNA, 21 nt, RNAi
ucugaaguuguagccaggcuu

SEQ ID NO: 41397 - RNA, 21 nt, RNAi
uuagacuucaacaucgguccg

SEQ ID NO: 41398 - DNA, 21 bp, homo sapiens
caggcctgcttcattgtctaa

SEQ ID NO: 41399 - RNA, 21 nt, RNAi
ggccugcuucauugucuaauu

SEQ ID NO: 41400 - RNA, 21 nt, RNAi
uuccggacgaaguaacagauu

SEQ ID NO: 41401 - DNA, 21 bp, homo sapiens
cagcgaagacatactgcagga

SEQ ID NO: 41402 - RNA, 21 nt, RNAi
gcgaagacauacugcaggauu

SEQ ID NO: 41403 - RNA, 21 nt, RNAi
uucgcuucuguaugacguccu

SEQ ID NO: 41404 - DNA, 21 bp, homo sapiens
caattgttgatagtagatcag

SEQ ID NO: 41405 - RNA, 21 nt, RNAi
auuguugauaguagaucaguu

SEQ ID NO: 41406 - RNA, 21 nt, RNAi
uuuaacaacuaucaucuaguc

SEQ ID NO: 41407 - DNA, 21 bp, homo sapiens
caaagaaacctcggaagagag

SEQ ID NO: 41408 - RNA, 21 nt, RNAi
aagaaaccucggaagagaguu

SEQ ID NO: 41409 - RNA, 21 nt, RNAi
uuuucuuuggagccuucucuc

SEQ ID NO: 41410 - DNA, 21 bp, homo sapiens
cagtagttactcagcatgagc

SEQ ID NO: 41411 - RNA, 21 nt, RNAi
guaguuacucagcaugagcuu

SEQ ID NO: 41412 - RNA, 21 nt, RNAi
uucaucaaugagucguacucg

SEQ ID NO: 41413 - DNA, 21 bp, homo sapiens
cagcatgagcctgcaggacaa

SEQ ID NO: 41414 - RNA, 21 nt, RNAi
gcaugagccugcaggacaauu

SEQ ID NO: 41415 - RNA, 21 nt, RNAi
uucguacucggacguccuguu

SEQ ID NO: 41416 - DNA, 21 bp, homo sapiens
catggcagaagaagatgaaca

SEQ ID NO: 41417 - RNA, 21 nt, RNAi
uggcagaagaagaugaacauu

SEQ ID NO: 41418 - RNA, 21 nt, RNAi
uuaccgucuucuucuacuugu

SEQ ID NO: 41419 - DNA, 21 bp, homo sapiens
cagaagaagatgaacaaagat

SEQ ID NO: 41420 - RNA, 21 nt, RNAi
gaagaagaugaacaaagauuu

SEQ ID NO: 41421 - RNA, 21 nt, RNAi
uucuucuucuacuuguuucua

SEQ ID NO: 41422 - DNA, 21 bp, homo sapiens
cacactgaatgacctgattaa

SEQ ID NO: 41423 - RNA, 21 nt, RNAi
cacugaaugaccugauuaauu

SEQ ID NO: 41424 - RNA, 21 nt, RNAi
uugugacuuacuggacuaauu

SEQ ID NO: 41425 - DNA, 21 bp, homo sapiens
cacttattgaaccaatcacaa

SEQ ID NO: 41426 - RNA, 21 nt, RNAi
cuuauugaaccaaucacaauu

SEQ ID NO: 41427 - RNA, 21 nt, RNAi
uugaauaacuugguuaguguu

SEQ ID NO: 41428 - DNA, 21 bp, homo sapiens
caatcacaagtcctattgaaa

SEQ ID NO: 41429 - RNA, 21 nt, RNAi
aucacaaguccuauugaaauu

SEQ ID NO: 41430 - RNA, 21 nt, RNAi
uuuaguguucaggauaacuuu

SEQ ID NO: 41431 - DNA, 21 bp, homo sapiens
caatctatgagaaagccattc

SEQ ID NO: 41432 - RNA, 21 nt, RNAi
aucuaugagaaagccauucuu

SEQ ID NO: 41433 - RNA, 21 nt, RNAi
uuuagauacucuuucgguaag

SEQ ID NO: 41434 - DNA, 21 bp, homo sapiens
cagcctattgaagagatgcga

SEQ ID NO: 41435 - RNA, 21 nt, RNAi
gccuauugaagagaugcgauu

SEQ ID NO: 41436 - RNA, 21 nt, RNAi
uucggauaacuucucuacgcu

SEQ ID NO: 41437 - DNA, 21 bp, homo sapiens
cacacgattgtagatattcta

SEQ ID NO: 41438 - RNA, 21 nt, RNAi
cacgauuguagauauucuauu

SEQ ID NO: 41439 - RNA, 21 nt, RNAi
uugugcuaacaucuauaagau

SEQ ID NO: 41440 - DNA, 21 bp, homo sapiens
cacgattgtagatattctaac

SEQ ID NO: 41441 - RNA, 21 nt, RNAi
cgauuguagauauucuaacuu

SEQ ID NO: 41442 - RNA, 21 nt, RNAi
uugcuaacaucuauaagauug

SEQ ID NO: 41443 - DNA, 21 bp, homo sapiens
caagcaaggaagaagtcagag

SEQ ID NO: 41444 - RNA, 21 nt, RNAi
agcaaggaagaagucagaguu

SEQ ID NO: 41445 - RNA, 21 nt, RNAi
uuucguuccuucuucagucuc

SEQ ID NO: 41446 - DNA, 21 bp, homo sapiens
caaggaagaagtcagagaagt

SEQ ID NO: 41447 - RNA, 21 nt, RNAi
aggaagaagucagagaaguuu

SEQ ID NO: 41448 - RNA, 21 nt, RNAi
uuuccuucuucagucucuuca

SEQ ID NO: 41449 - DNA, 21 bp, homo sapiens
cagagaagtcagtattgaaga

SEQ ID NO: 41450 - RNA, 21 nt, RNAi
gagaagucaguauugaagauu

SEQ ID NO: 41451 - RNA, 21 nt, RNAi
uucucuucagucauaacuucu

SEQ ID NO: 41452 - DNA, 21 bp, homo sapiens
cagtattgaagatacaggtgt

SEQ ID NO: 41453 - RNA, 21 nt, RNAi
guauugaagauacagguguuu

SEQ ID NO: 41454 - RNA, 21 nt, RNAi
uucauaacuucuauguccaca

SEQ ID NO: 41455 - DNA, 21 bp, homo sapiens
caggtgttgatgtagatccag

SEQ ID NO: 41456 - RNA, 21 nt, RNAi
gguguugauguagauccaguu

SEQ ID NO: 41457 - RNA, 21 nt, RNAi
uuccacaacuacaucuagguc

SEQ ID NO: 41458 - DNA, 21 bp, homo sapiens
caatacagaaacgaggacaag

SEQ ID NO: 41459 - RNA, 21 nt, RNAi
auacagaaacgaggacaaguu

SEQ ID NO: 41460 - RNA, 21 nt, RNAi
uuuaugucuuugcuccuguuc

SEQ ID NO: 41461 - DNA, 21 bp, homo sapiens
cagaaacgaggacaagttgct

SEQ ID NO: 41462 - RNA, 21 nt, RNAi
gaaacgaggacaaguugcuuu

SEQ ID NO: 41463 - RNA, 21 nt, RNAi
uucuuugcuccuguucaacga

SEQ ID NO: 41464 - DNA, 21 bp, homo sapiens
cagtttgatggaacaaattcc

SEQ ID NO: 41465 - RNA, 21 nt, RNAi
guuugauggaacaaauuccuu

SEQ ID NO: 41466 - RNA, 21 nt, RNAi
uucaaacuaccuuguuuaagg

SEQ ID NO: 41467 - DNA, 21 bp, homo sapiens
caaattccgcatttaaagagc

SEQ ID NO: 41468 - RNA, 21 nt, RNAi
aauuccgcauuuaaagagcuu

SEQ ID NO: 41469 - RNA, 21 nt, RNAi
uuuuaaggcguaaauuucucg

SEQ ID NO: 41470 - DNA, 21 bp, homo sapiens
caccagtgagacgttctcgac

SEQ ID NO: 41471 - RNA, 21 nt, RNAi
ccagugagacguucucgacuu

SEQ ID NO: 41472 - RNA, 21 nt, RNAi
uuggucacucugcaagagcug

SEQ ID NO: 41473 - DNA, 21 bp, homo sapiens
cagtgagacgttctcgacgtc

SEQ ID NO: 41474 - RNA, 21 nt, RNAi
gugagacguucucgacgucuu

SEQ ID NO: 41475 - RNA, 21 nt, RNAi
uucacucugcaagagcugcag

SEQ ID NO: 41476 - DNA, 21 bp, homo sapiens
cattatccttgtgtgtcttca

SEQ ID NO: 41477 - RNA, 21 nt, RNAi
uuauccuugugugucuucauu

SEQ ID NO: 41478 - RNA, 21 nt, RNAi
uuaauaggaacacacagaagu

SEQ ID NO: 41479 - DNA, 21 bp, homo sapiens
cattggaacagctaacggagt

SEQ ID NO: 41480 - RNA, 21 nt, RNAi
uuggaacagcuaacggaguuu

SEQ ID NO: 41481 - RNA, 21 nt, RNAi
uuaaccuugucgauugccuca

SEQ ID NO: 41482 - DNA, 21 bp, homo sapiens
catgtacctatgtatcctaag

SEQ ID NO: 41483 - RNA, 21 nt, RNAi
uguaccuauguauccuaaguu

SEQ ID NO: 41484 - RNA, 21 nt, RNAi
uuacauggauacauaggauuc

SEQ ID NO: 41485 - DNA, 21 bp, homo sapiens
cattcacggcagtgagctcct

SEQ ID NO: 41486 - RNA, 21 nt, RNAi
uucacggcagugagcuccuuu

SEQ ID NO: 41487 - RNA, 21 nt, RNAi
uuaagugccgucacucgagga

SEQ ID NO: 41488 - DNA, 21 bp, homo sapiens
cacggcagtgagctcctttac

SEQ ID NO: 41489 - RNA, 21 nt, RNAi
cggcagugagcuccuuuacuu

SEQ ID NO: 41490 - RNA, 21 nt, RNAi
uugccgucacucgaggaaaug

SEQ ID NO: 41491 - DNA, 21 bp, homo sapiens
cagtgagctcctttactaaca

SEQ ID NO: 41492 - RNA, 21 nt, RNAi
gugagcuccuuuacuaacauu

SEQ ID NO: 41493 - RNA, 21 nt, RNAi
uucacucgaggaaaugauugu

SEQ ID NO: 41494 - DNA, 21 bp, homo sapiens
cattcatgttatggcaagagt

SEQ ID NO: 41495 - RNA, 21 nt, RNAi
uucauguuauggcaagaguuu

SEQ ID NO: 41496 - RNA, 21 nt, RNAi
uuaaguacaauaccguucuca

SEQ ID NO: 41497 - DNA, 21 bp, homo sapiens
catgttatggcaagagttgtc

SEQ ID NO: 41498 - RNA, 21 nt, RNAi
uguuauggcaagaguugucuu

SEQ ID NO: 41499 - RNA, 21 nt, RNAi
uuacaauaccguucucaacag

SEQ ID NO: 41500 - DNA, 21 bp, homo sapiens
caagagttgtcctctacattg

SEQ ID NO: 41501 - RNA, 21 nt, RNAi
agaguuguccucuacauuguu

SEQ ID NO: 41502 - RNA, 21 nt, RNAi
uuucucaacaggagauguaac

SEQ ID NO: 41503 - DNA, 21 bp, homo sapiens
cattggaaagctaatcctacc

SEQ ID NO: 41504 - RNA, 21 nt, RNAi
uuggaaagcuaauccuaccuu

SEQ ID NO: 41505 - RNA, 21 nt, RNAi
uuaaccuuucgauuaggaugg

SEQ ID NO: 41506 - DNA, 21 bp, homo sapiens
cagtttcaaccaactgagttt

SEQ ID NO: 41507 - RNA, 21 nt, RNAi
guuucaaccaacugaguuuuu

SEQ ID NO: 41508 - RNA, 21 nt, RNAi
uucaaaguugguugacucaaa

SEQ ID NO: 41509 - DNA, 21 bp, homo sapiens
cagctagtttactatgttcct

SEQ ID NO: 41510 - RNA, 21 nt, RNAi
gcuaguuuacuauguuccuuu

SEQ ID NO: 41511 - RNA, 21 nt, RNAi
uucgaucaaaugauacaagga

SEQ ID NO: 41512 - DNA, 21 bp, homo sapiens
cacttcgaatactaagacaca

SEQ ID NO: 41513 - RNA, 21 nt, RNAi
cuucgaauacuaagacacauu

SEQ ID NO: 41514 - RNA, 21 nt, RNAi
uugaagcuuaugauucugugu

SEQ ID NO: 41515 - DNA, 21 bp, homo sapiens
cacaggaggtttagcctgctt

SEQ ID NO: 41516 - RNA, 21 nt, RNAi
caggagguuuagccugcuuuu

SEQ ID NO: 41517 - RNA, 21 nt, RNAi
uuguccuccaaaucggacgaa

SEQ ID NO: 41518 - DNA, 21 bp, homo sapiens
caggaggtttagcctgctttc

SEQ ID NO: 41519 - RNA, 21 nt, RNAi
ggagguuuagccugcuuucuu

SEQ ID NO: 41520 - RNA, 21 nt, RNAi
uuccuccaaaucggacgaaag

SEQ ID NO: 41521 - DNA, 21 bp, homo sapiens
cagacttgtgttctcttgcgt

SEQ ID NO: 41522 - RNA, 21 nt, RNAi
gacuuguguucucuugcguuu

SEQ ID NO: 41523 - RNA, 21 nt, RNAi
uucugaacacaagagaacgca

SEQ ID NO: 41524 - DNA, 21 bp, homo sapiens
cagtagtctgtagtttcgtgg

SEQ ID NO: 41525 - RNA, 21 nt, RNAi
guagucuguaguuucgugguu

SEQ ID NO: 41526 - RNA, 21 nt, RNAi
uucaucagacaucaaagcacc

SEQ ID NO: 41527 - DNA, 21 bp, homo sapiens
caccaagaaggtttacttaat

SEQ ID NO: 41528 - RNA, 21 nt, RNAi
ccaagaagguuuacuuaauuu

SEQ ID NO: 41529 - RNA, 21 nt, RNAi
uugguucuuccaaaugaauua

SEQ ID NO: 41530 - DNA, 21 bp, homo sapiens
catactgaacaaatgtcattc

SEQ ID NO: 41531 - RNA, 21 nt, RNAi
uacugaacaaaugucauucuu

SEQ ID NO: 41532 - RNA, 21 nt, RNAi
uuaugacuuguuuacaguaag

SEQ ID NO: 41533 - DNA, 21 bp, homo sapiens
catgatagttacatacacagt

SEQ ID NO: 41534 - RNA, 21 nt, RNAi
ugauaguuacauacacaguuu

SEQ ID NO: 41535 - RNA, 21 nt, RNAi
uuacuaucaauguauguguca

SEQ ID NO: 41536 - DNA, 21 bp, homo sapiens
cacacataaataacaccacta

SEQ ID NO: 41537 - RNA, 21 nt, RNAi
cacauaaauaacaccacuauu

SEQ ID NO: 41538 - RNA, 21 nt, RNAi
uuguguauuuauuguggugau

SEQ ID NO: 41539 - DNA, 21 bp, homo sapiens
cacatgcttagtcatttctat

SEQ ID NO: 41540 - RNA, 21 nt, RNAi
caugcuuagucauuucuauuu

SEQ ID NO: 41541 - RNA, 21 nt, RNAi
uuguacgaaucaguaaagaua

SEQ ID NO: 41542 - DNA, 21 bp, homo sapiens
catgcttagtcatttctatgt

SEQ ID NO: 41543 - RNA, 21 nt, RNAi
ugcuuagucauuucuauguuu

SEQ ID NO: 41544 - RNA, 21 nt, RNAi
uuacgaaucaguaaagauaca

SEQ ID NO: 41545 - DNA, 21 bp, homo sapiens
catttctatgttcattccact

SEQ ID NO: 41546 - RNA, 21 nt, RNAi
uuucuauguucauuccacuuu

SEQ ID NO: 41547 - RNA, 21 nt, RNAi
uuaaagauacaaguaagguga

SEQ ID NO: 41548 - DNA, 21 bp, homo sapiens
catgttctagagagtaggact

SEQ ID NO: 41549 - RNA, 21 nt, RNAi
uguucuagagaguaggacuuu

SEQ ID NO: 41550 - RNA, 21 nt, RNAi
uuacaagaucucucauccuga

SEQ ID NO: 41551 - DNA, 21 bp, homo sapiens
cagtttaaccacagtgaatga

SEQ ID NO: 41552 - RNA, 21 nt, RNAi
guuuaaccacagugaaugauu

SEQ ID NO: 41553 - RNA, 21 nt, RNAi
uucaaauuggugucacuuacu

SEQ ID NO: 41554 - DNA, 21 bp, homo sapiens
cattgtaagatttgacttgag

SEQ ID NO: 41555 - RNA, 21 nt, RNAi
uuguaagauuugacuugaguu

SEQ ID NO: 41556 - RNA, 21 nt, RNAi
uuaacauucuaaacugaacuc

SEQ ID NO: 41557 - DNA, 21 bp, homo sapiens
cacttaagtacatgcttaatg

SEQ ID NO: 41558 - RNA, 21 nt, RNAi
cuuaaguacaugcuuaauguu

SEQ ID NO: 41559 - RNA, 21 nt, RNAi
uugaauucauguacgaauuac

SEQ ID NO: 41560 - DNA, 21 bp, homo sapiens
catcagtctacttacataaac

SEQ ID NO: 41561 - RNA, 21 nt, RNAi
ucagucuacuuacauaaacuu

SEQ ID NO: 41562 - RNA, 21 nt, RNAi
uuagucagaugaauguauuug

SEQ ID NO: 41563 - DNA, 21 bp, homo sapiens
gaggaagttctatcttggcgc

SEQ ID NO: 41564 - RNA, 21 nt, RNAi
ggaaguucuaucuuggcgcuu

SEQ ID NO: 41565 - RNA, 21 nt, RNAi
uuccuucaagauagaaccgcg

SEQ ID NO: 41566 - DNA, 21 bp, homo sapiens
gaagttctatcttggcgctaa

SEQ ID NO: 41567 - RNA, 21 nt, RNAi
aguucuaucuuggcgcuaauu

SEQ ID NO: 41568 - RNA, 21 nt, RNAi
uuucaagauagaaccgcgauu

SEQ ID NO: 41569 - DNA, 21 bp, homo sapiens
gaggctacgatgagcacaccg

SEQ ID NO: 41570 - RNA, 21 nt, RNAi
ggcuacgaugagcacaccguu

SEQ ID NO: 41571 - RNA, 21 nt, RNAi
uuccgaugcuacucguguggc

SEQ ID NO: 41572 - DNA, 21 bp, homo sapiens
gagatgttatccagtagagat

SEQ ID NO: 41573 - RNA, 21 nt, RNAi
gauguuauccaguagagauuu

SEQ ID NO: 41574 - RNA, 21 nt, RNAi
uucuacaauaggucaucucua

SEQ ID NO: 41575 - DNA, 21 bp, homo sapiens
gatgttatccagtagagatca

SEQ ID NO: 41576 - RNA, 21 nt, RNAi
uguuauccaguagagaucauu

SEQ ID NO: 41577 - RNA, 21 nt, RNAi
uuacaauaggucaucucuagu

SEQ ID NO: 41578 - DNA, 21 bp, homo sapiens
gagatcagagagttgtgacat

SEQ ID NO: 41579 - RNA, 21 nt, RNAi
gaucagagaguugugacauuu

SEQ ID NO: 41580 - RNA, 21 nt, RNAi
uucuagucucucaacacugua

SEQ ID NO: 41581 - DNA, 21 bp, homo sapiens
gatcagagagttgtgacatct

SEQ ID NO: 41582 - RNA, 21 nt, RNAi
ucagagaguugugacaucuuu

SEQ ID NO: 41583 - RNA, 21 nt, RNAi
uuagucucucaacacuguaga

SEQ ID NO: 41584 - DNA, 21 bp, homo sapiens
gagagttgtgacatctgagga

SEQ ID NO: 41585 - RNA, 21 nt, RNAi
gaguugugacaucugaggauu

SEQ ID NO: 41586 - RNA, 21 nt, RNAi
uucucaacacuguagacuccu

SEQ ID NO: 41587 - DNA, 21 bp, homo sapiens
gagttgtgacatctgaggacc

SEQ ID NO: 41588 - RNA, 21 nt, RNAi
guugugacaucugaggaccuu

SEQ ID NO: 41589 - RNA, 21 nt, RNAi
uucaacacuguagacuccugg

SEQ ID NO: 41590 - DNA, 21 bp, homo sapiens
gacatctgaggaccaagttca

SEQ ID NO: 41591 - RNA, 21 nt, RNAi
caucugaggaccaaguucauu

SEQ ID NO: 41592 - RNA, 21 nt, RNAi
uuguagacuccugguucaagu

SEQ ID NO: 41593 - DNA, 21 bp, homo sapiens
gactaaagtgctgaaacttaa

SEQ ID NO: 41594 - RNA, 21 nt, RNAi
cuaaagugcugaaacuuaauu

SEQ ID NO: 41595 - RNA, 21 nt, RNAi
uugauuucacgacuuugaauu

SEQ ID NO: 41596 - DNA, 21 bp, homo sapiens
gaagagacctgcagagagcaa

SEQ ID NO: 41597 - RNA, 21 nt, RNAi
agagaccugcagagagcaauu

SEQ ID NO: 41598 - RNA, 21 nt, RNAi
uuucucuggacgucucucguu

SEQ ID NO: 41599 - DNA, 21 bp, homo sapiens
gaactaaccaattcaactgta

SEQ ID NO: 41600 - RNA, 21 nt, RNAi
acuaaccaauucaacuguauu

SEQ ID NO: 41601 - RNA, 21 nt, RNAi
uuugauugguuaaguugacau

SEQ ID NO: 41602 - DNA, 21 bp, homo sapiens
gacacacataaacctaaggat

SEQ ID NO: 41603 - RNA, 21 nt, RNAi
cacacauaaaccuaaggauuu

SEQ ID NO: 41604 - RNA, 21 nt, RNAi
uuguguguauuuggauuccua

SEQ ID NO: 41605 - DNA, 21 bp, homo sapiens
gatagtaatcaaactccgcat

SEQ ID NO: 41606 - RNA, 21 nt, RNAi
uaguaaucaaacuccgcauuu

SEQ ID NO: 41607 - RNA, 21 nt, RNAi
uuaucauuaguuugaggcgua

SEQ ID NO: 41608 - DNA, 21 bp, homo sapiens
gacattaagccaggcatttca

SEQ ID NO: 41609 - RNA, 21 nt, RNAi
cauuaagccaggcauuucauu

SEQ ID NO: 41610 - RNA, 21 nt, RNAi
uuguaauucgguccguaaagu

SEQ ID NO: 41611 - DNA, 21 bp, homo sapiens
gaaacctgtgcttggatctta

SEQ ID NO: 41612 - RNA, 21 nt, RNAi
aaccugugcuuggaucuuauu

SEQ ID NO: 41613 - RNA, 21 nt, RNAi
uuuuggacacgaaccuagaau

SEQ ID NO: 41614 - DNA, 21 bp, homo sapiens
gatcttatcgtggccagattg

SEQ ID NO: 41615 - RNA, 21 nt, RNAi
ucuuaucguggccagauuguu

SEQ ID NO: 41616 - RNA, 21 nt, RNAi
uuagaauagcaccggucuaac

SEQ ID NO: 41617 - DNA, 21 bp, homo sapiens
gatgagagttctgcagcaaca

SEQ ID NO: 41618 - RNA, 21 nt, RNAi
ugagaguucugcagcaacauu

SEQ ID NO: 41619 - RNA, 21 nt, RNAi
uuacucucaagacgucguugu

SEQ ID NO: 41620 - DNA, 21 bp, homo sapiens
gagagttctgcagcaacaaag

SEQ ID NO: 41621 - RNA, 21 nt, RNAi
gaguucugcagcaacaaaguu

SEQ ID NO: 41622 - RNA, 21 nt, RNAi
uucucaagacgucguuguuuc

SEQ ID NO: 41623 - DNA, 21 bp, homo sapiens
gagttctgcagcaacaaagaa

SEQ ID NO: 41624 - RNA, 21 nt, RNAi
guucugcagcaacaaagaauu

SEQ ID NO: 41625 - RNA, 21 nt, RNAi
uucaagacgucguuguuucuu

SEQ ID NO: 41626 - DNA, 21 bp, homo sapiens
gaaactttcagccactatacc

SEQ ID NO: 41627 - RNA, 21 nt, RNAi
aacuuucagccacuauaccuu

SEQ ID NO: 41628 - RNA, 21 nt, RNAi
uuuugaaagucggugauaugg

SEQ ID NO: 41629 - DNA, 21 bp, homo sapiens
gatcctccaatatgactgcca

SEQ ID NO: 41630 - RNA, 21 nt, RNAi
uccuccaauaugacugccauu

SEQ ID NO: 41631 - RNA, 21 nt, RNAi
uuaggagguuauacugacggu

SEQ ID NO: 41632 - DNA, 21 bp, homo sapiens
gactgccactactaaatttgt

SEQ ID NO: 41633 - RNA, 21 nt, RNAi
cugccacuacuaaauuuguuu

SEQ ID NO: 41634 - RNA, 21 nt, RNAi
uugacggugaugauuuaaaca

SEQ ID NO: 41635 - DNA, 21 bp, homo sapiens
gagcactacatctcagaacac

SEQ ID NO: 41636 - RNA, 21 nt, RNAi
gcacuacaucucagaacacuu

SEQ ID NO: 41637 - RNA, 21 nt, RNAi
uucgugauguagagucuugug

SEQ ID NO: 41638 - DNA, 21 bp, homo sapiens
gaacacacaacttgtgcgacc

SEQ ID NO: 41639 - RNA, 21 nt, RNAi
acacacaacuugugcgaccuu

SEQ ID NO: 41640 - RNA, 21 nt, RNAi
uuuguguguugaacacgcugg

SEQ ID NO: 41641 - DNA, 21 bp, homo sapiens
gacctcctattagaagtcatc

SEQ ID NO: 41642 - RNA, 21 nt, RNAi
ccuccuauuagaagucaucuu

SEQ ID NO: 41643 - RNA, 21 nt, RNAi
uuggaggauaaucuucaguag

SEQ ID NO: 41644 - DNA, 21 bp, homo sapiens
gacactgtgaaacaaggcatc

SEQ ID NO: 41645 - RNA, 21 nt, RNAi
cacugugaaacaaggcaucuu

SEQ ID NO: 41646 - RNA, 21 nt, RNAi
uugugacacuuuguuccguag

SEQ ID NO: 41647 - DNA, 21 bp, homo sapiens
gaaacaaggcatcagtagaac

SEQ ID NO: 41648 - RNA, 21 nt, RNAi
aacaaggcaucaguagaacuu

SEQ ID NO: 41649 - RNA, 21 nt, RNAi
uuuuguuccguagucaucuug

SEQ ID NO: 41650 - DNA, 21 bp, homo sapiens
gaacctctgccaatgttacaa

SEQ ID NO: 41651 - RNA, 21 nt, RNAi
accucugccaauguuacaauu

SEQ ID NO: 41652 - RNA, 21 nt, RNAi
uuuggagacgguuacaauguu

SEQ ID NO: 41653 - DNA, 21 bp, homo sapiens
gactctatcaagatccatagc

SEQ ID NO: 41654 - RNA, 21 nt, RNAi
cucuaucaagauccauagcuu

SEQ ID NO: 41655 - RNA, 21 nt, RNAi
uugagauaguucuagguaucg

SEQ ID NO: 41656 - DNA, 21 bp, homo sapiens
gatccatagcatctgaagttg

SEQ ID NO: 41657 - RNA, 21 nt, RNAi
uccauagcaucugaaguuguu

SEQ ID NO: 41658 - RNA, 21 nt, RNAi
uuagguaucguagacuucaac

SEQ ID NO: 41659 - DNA, 21 bp, homo sapiens
gaagttgtagccaggcctgct

SEQ ID NO: 41660 - RNA, 21 nt, RNAi
aguuguagccaggccugcuuu

SEQ ID NO: 41661 - RNA, 21 nt, RNAi
uuucaacaucgguccggacga

SEQ ID NO: 41662 - DNA, 21 bp, homo sapiens
gaccagcgaagacatactgca

SEQ ID NO: 41663 - RNA, 21 nt, RNAi
ccagcgaagacauacugcauu

SEQ ID NO: 41664 - RNA, 21 nt, RNAi
uuggucgcuucuguaugacgu

SEQ ID NO: 41665 - DNA, 21 bp, homo sapiens
gagtgagtggaaagctggcaa

SEQ ID NO: 41666 - RNA, 21 nt, RNAi
gugaguggaaagcuggcaauu

SEQ ID NO: 41667 - RNA, 21 nt, RNAi
uucacucaccuuucgaccguu

SEQ ID NO: 41668 - DNA, 21 bp, homo sapiens
gagtggaaagctggcaaagga

SEQ ID NO: 41669 - RNA, 21 nt, RNAi
guggaaagcuggcaaaggauu

SEQ ID NO: 41670 - RNA, 21 nt, RNAi
uucaccuuucgaccguuuccu

SEQ ID NO: 41671 - DNA, 21 bp, homo sapiens
gaaagctggcaaaggaagagt

SEQ ID NO: 41672 - RNA, 21 nt, RNAi
aagcuggcaaaggaagaguuu

SEQ ID NO: 41673 - RNA, 21 nt, RNAi
uuuucgaccguuuccuucuca

SEQ ID NO: 41674 - DNA, 21 bp, homo sapiens
gactaccatggcagaagaaga

SEQ ID NO: 41675 - RNA, 21 nt, RNAi
cuaccauggcagaagaagauu

SEQ ID NO: 41676 - RNA, 21 nt, RNAi
uugaugguaccgucuucuucu

SEQ ID NO: 41677 - DNA, 21 bp, homo sapiens
gaatgcctgaacttgattaat

SEQ ID NO: 41678 - RNA, 21 nt, RNAi
augccugaacuugauuaauuu

SEQ ID NO: 41679 - RNA, 21 nt, RNAi
uuuacggacuugaacuaauua

SEQ ID NO: 41680 - DNA, 21 bp, homo sapiens
gaagatatactggtcacactg

SEQ ID NO: 41681 - RNA, 21 nt, RNAi
agauauacuggucacacuguu

SEQ ID NO: 41682 - RNA, 21 nt, RNAi
uuucuauaugaccagugugac

SEQ ID NO: 41683 - DNA, 21 bp, homo sapiens
gatatactggtcacactgaat

SEQ ID NO: 41684 - RNA, 21 nt, RNAi
uauacuggucacacugaauuu

SEQ ID NO: 41685 - RNA, 21 nt, RNAi
uuauaugaccagugugacuua

SEQ ID NO: 41686 - DNA, 21 bp, homo sapiens
gatatgtcttgcacttattga

SEQ ID NO: 41687 - RNA, 21 nt, RNAi
uaugucuugcacuuauugauu

SEQ ID NO: 41688 - RNA, 21 nt, RNAi
uuauacagaacgugaauaacu

SEQ ID NO: 41689 - DNA, 21 bp, homo sapiens
gaaccaatcacaagtcctatt

SEQ ID NO: 41690 - RNA, 21 nt, RNAi
accaaucacaaguccuauuuu

SEQ ID NO: 41691 - RNA, 21 nt, RNAi
uuugguuaguguucaggauaa

SEQ ID NO: 41692 - DNA, 21 bp, homo sapiens
gaagagatgcgacacacgatt

SEQ ID NO: 41693 - RNA, 21 nt, RNAi
agagaugcgacacacgauuuu

SEQ ID NO: 41694 - RNA, 21 nt, RNAi
uuucucuacgcugugugcuaa

SEQ ID NO: 41695 - DNA, 21 bp, homo sapiens
gagatgcgacacacgattgta

SEQ ID NO: 41696 - RNA, 21 nt, RNAi
gaugcgacacacgauuguauu

SEQ ID NO: 41697 - RNA, 21 nt, RNAi
uucuacgcugugugcuaacau

SEQ ID NO: 41698 - DNA, 21 bp, homo sapiens
gatgcgacacacgattgtaga

SEQ ID NO: 41699 - RNA, 21 nt, RNAi
ugcgacacacgauuguagauu

SEQ ID NO: 41700 - RNA, 21 nt, RNAi
uuacgcugugugcuaacaucu

SEQ ID NO: 41701 - DNA, 21 bp, homo sapiens
gacacacgattgtagatattc

SEQ ID NO: 41702 - RNA, 21 nt, RNAi
cacacgauuguagauauucuu

SEQ ID NO: 41703 - RNA, 21 nt, RNAi
uugugugcuaacaucuauaag

SEQ ID NO: 41704 - DNA, 21 bp, homo sapiens
gagaagtcttgtgcaagcaag

SEQ ID NO: 41705 - RNA, 21 nt, RNAi
gaagucuugugcaagcaaguu

SEQ ID NO: 41706 - RNA, 21 nt, RNAi
uucuucagaacacguucguuc

SEQ ID NO: 41707 - DNA, 21 bp, homo sapiens
gaagtcttgtgcaagcaagga

SEQ ID NO: 41708 - RNA, 21 nt, RNAi
agucuugugcaagcaaggauu

SEQ ID NO: 41709 - RNA, 21 nt, RNAi
uuucagaacacguucguuccu

SEQ ID NO: 41710 - DNA, 21 bp, homo sapiens
gaagaagtcagagaagtcagt

SEQ ID NO: 41711 - RNA, 21 nt, RNAi
agaagucagagaagucaguuu

SEQ ID NO: 41712 - RNA, 21 nt, RNAi
uuucuucagucucuucaguca

SEQ ID NO: 41713 - DNA, 21 bp, homo sapiens
gaagtcagagaagtcagtatt

SEQ ID NO: 41714 - RNA, 21 nt, RNAi
agucagagaagucaguauuuu

SEQ ID NO: 41715 - RNA, 21 nt, RNAi
uuucagucucuucagucauaa

SEQ ID NO: 41716 - DNA, 21 bp, homo sapiens
gagaagtcagtattgaagata

SEQ ID NO: 41717 - RNA, 21 nt, RNAi
gaagucaguauugaagauauu

SEQ ID NO: 41718 - RNA, 21 nt, RNAi
uucuucagucauaacuucuau

SEQ ID NO: 41719 - DNA, 21 bp, homo sapiens
gaagtcagtattgaagataca

SEQ ID NO: 41720 - RNA, 21 nt, RNAi
agucaguauugaagauacauu

SEQ ID NO: 41721 - RNA, 21 nt, RNAi
uuucagucauaacuucuaugu

SEQ ID NO: 41722 - DNA, 21 bp, homo sapiens
gaagatacaggtgttgatgta

SEQ ID NO: 41723 - RNA, 21 nt, RNAi
agauacagguguugauguauu

SEQ ID NO: 41724 - RNA, 21 nt, RNAi
uuucuauguccacaacuacau

SEQ ID NO: 41725 - DNA, 21 bp, homo sapiens
gatacaggtgttgatgtagat

SEQ ID NO: 41726 - RNA, 21 nt, RNAi
uacagguguugauguagauuu

SEQ ID NO: 41727 - RNA, 21 nt, RNAi
uuauguccacaacuacaucua

SEQ ID NO: 41728 - DNA, 21 bp, homo sapiens
gaaatggagagtaaacttcat

SEQ ID NO: 41729 - RNA, 21 nt, RNAi
aauggagaguaaacuucauuu

SEQ ID NO: 41730 - RNA, 21 nt, RNAi
uuuuaccucucauuugaagua

SEQ ID NO: 41731 - DNA, 21 bp, homo sapiens
gaaacgaggacaagttgctta

SEQ ID NO: 41732 - RNA, 21 nt, RNAi
aacgaggacaaguugcuuauu

SEQ ID NO: 41733 - RNA, 21 nt, RNAi
uuuugcuccuguucaacgaau

SEQ ID NO: 41734 - DNA, 21 bp, homo sapiens
gaggacaagttgcttaattaa

SEQ ID NO: 41735 - RNA, 21 nt, RNAi
ggacaaguugcuuaauuaauu

SEQ ID NO: 41736 - RNA, 21 nt, RNAi
uuccuguucaacgaauuaauu

SEQ ID NO: 41737 - DNA, 21 bp, homo sapiens
gatggaacaaattccgcattt

SEQ ID NO: 41738 - RNA, 21 nt, RNAi
uggaacaaauuccgcauuuuu

SEQ ID NO: 41739 - RNA, 21 nt, RNAi
uuaccuuguuuaaggcguaaa

SEQ ID NO: 41740 - DNA, 21 bp, homo sapiens
gaacaaattccgcatttaaag

SEQ ID NO: 41741 - RNA, 21 nt, RNAi
acaaauuccgcauuuaaaguu

SEQ ID NO: 41742 - RNA, 21 nt, RNAi
uuuguuuaaggcguaaauuuc

SEQ ID NO: 41743 - DNA, 21 bp, homo sapiens
gagacgttctcgacgtcttca

SEQ ID NO: 41744 - RNA, 21 nt, RNAi
gacguucucgacgucuucauu

SEQ ID NO: 41745 - RNA, 21 nt, RNAi
uucugcaagagcugcagaagu

SEQ ID NO: 41746 - DNA, 21 bp, homo sapiens
gacgttctcgacgtcttcaag

SEQ ID NO: 41747 - RNA, 21 nt, RNAi
cguucucgacgucuucaaguu

SEQ ID NO: 41748 - RNA, 21 nt, RNAi
uugcaagagcugcagaaguuc

SEQ ID NO: 41749 - DNA, 21 bp, homo sapiens
gatcattatccttgtgtgtct

SEQ ID NO: 41750 - RNA, 21 nt, RNAi
ucauuauccuugugugucuuu

SEQ ID NO: 41751 - RNA, 21 nt, RNAi
uuaguaauaggaacacacaga

SEQ ID NO: 41752 - DNA, 21 bp, homo sapiens
gagtagctttatattgctctt

SEQ ID NO: 41753 - RNA, 21 nt, RNAi
guagcuuuauauugcucuuuu

SEQ ID NO: 41754 - RNA, 21 nt, RNAi
uucaucgaaauauaacgagaa

SEQ ID NO: 41755 - DNA, 21 bp, homo sapiens
gagttggccatgtacctatgt

SEQ ID NO: 41756 - RNA, 21 nt, RNAi
guuggccauguaccuauguuu

SEQ ID NO: 41757 - RNA, 21 nt, RNAi
uucaaccgguacauggauaca

SEQ ID NO: 41758 - DNA, 21 bp, homo sapiens
gagctcctttactaacattca

SEQ ID NO: 41759 - RNA, 21 nt, RNAi
gcuccuuuacuaacauucauu

SEQ ID NO: 41760 - RNA, 21 nt, RNAi
uucgaggaaaugauuguaagu

SEQ ID NO: 41761 - DNA, 21 bp, homo sapiens
gagttgtcctctacattggaa

SEQ ID NO: 41762 - RNA, 21 nt, RNAi
guuguccucuacauuggaauu

SEQ ID NO: 41763 - RNA, 21 nt, RNAi
uucaacaggagauguaaccuu

SEQ ID NO: 41764 - DNA, 21 bp, homo sapiens
gaaagctaatcctaccttgtc

SEQ ID NO: 41765 - RNA, 21 nt, RNAi
aagcuaauccuaccuugucuu

SEQ ID NO: 41766 - RNA, 21 nt, RNAi
uuuucgauuaggauggaacag

SEQ ID NO: 41767 - DNA, 21 bp, homo sapiens
gaatgactcacttcgaatact

SEQ ID NO: 41768 - RNA, 21 nt, RNAi
augacucacuucgaauacuuu

SEQ ID NO: 41769 - RNA, 21 nt, RNAi
uuuacugagugaagcuuauga

SEQ ID NO: 41770 - DNA, 21 bp, homo sapiens
gactcacttcgaatactaaga

SEQ ID NO: 41771 - RNA, 21 nt, RNAi
cucacuucgaauacuaagauu

SEQ ID NO: 41772 - RNA, 21 nt, RNAi
uugagugaagcuuaugauucu

SEQ ID NO: 41773 - DNA, 21 bp, homo sapiens
gaatactaagacacaggaggt

SEQ ID NO: 41774 - RNA, 21 nt, RNAi
auacuaagacacaggagguuu

SEQ ID NO: 41775 - RNA, 21 nt, RNAi
uuuaugauucuguguccucca

SEQ ID NO: 41776 - DNA, 21 bp, homo sapiens
gacacaggaggtttagcctgc

SEQ ID NO: 41777 - RNA, 21 nt, RNAi
cacaggagguuuagccugcuu

SEQ ID NO: 41778 - RNA, 21 nt, RNAi
uuguguccuccaaaucggacg

SEQ ID NO: 41779 - DNA, 21 bp, homo sapiens
gaggtttagcctgctttctta

SEQ ID NO: 41780 - RNA, 21 nt, RNAi
gguuuagccugcuuucuuauu

SEQ ID NO: 41781 - RNA, 21 nt, RNAi
uuccaaaucggacgaaagaau

SEQ ID NO: 41782 - DNA, 21 bp, homo sapiens
gacttgtgttctcttgcgtcc

SEQ ID NO: 41783 - RNA, 21 nt, RNAi
cuuguguucucuugcguccuu

SEQ ID NO: 41784 - RNA, 21 nt, RNAi
uugaacacaagagaacgcagg

SEQ ID NO: 41785 - DNA, 21 bp, homo sapiens
gactgcctgttgattgatgga

SEQ ID NO: 41786 - RNA, 21 nt, RNAi
cugccuguugauugauggauu

SEQ ID NO: 41787 - RNA, 21 nt, RNAi
uugacggacaacuaacuaccu

SEQ ID NO: 41788 - DNA, 21 bp, homo sapiens
gattgatggaaagtgtctgca

SEQ ID NO: 41789 - RNA, 21 nt, RNAi
uugauggaaagugucugcauu

SEQ ID NO: 41790 - RNA, 21 nt, RNAi
uuaacuaccuuucacagacgu

SEQ ID NO: 41791 - DNA, 21 bp, homo sapiens
gatggaaagtgtctgcactga

SEQ ID NO: 41792 - RNA, 21 nt, RNAi
uggaaagugucugcacugauu

SEQ ID NO: 41793 - RNA, 21 nt, RNAi
uuaccuuucacagacgugacu

SEQ ID NO: 41794 - DNA, 21 bp, homo sapiens
gaaagtgtctgcactgacact

SEQ ID NO: 41795 - RNA, 21 nt, RNAi
aagugucugcacugacacuuu

SEQ ID NO: 41796 - RNA, 21 nt, RNAi
uuuucacagacgugacuguga

SEQ ID NO: 41797 - DNA, 21 bp, homo sapiens
gagaagatactttgtgtaaga

SEQ ID NO: 41798 - RNA, 21 nt, RNAi
gaagauacuuuguguaagauu

SEQ ID NO: 41799 - RNA, 21 nt, RNAi
uucuucuaugaaacacauucu

SEQ ID NO: 41800 - DNA, 21 bp, homo sapiens
gatgccacatttagtggttta

SEQ ID NO: 41801 - RNA, 21 nt, RNAi
ugccacauuuagugguuuauu

SEQ ID NO: 41802 - RNA, 21 nt, RNAi
uuacgguguaaaucaccaaau

SEQ ID NO: 41803 - DNA, 21 bp, homo sapiens
gaatgtgaagatcacatgctt

SEQ ID NO: 41804 - RNA, 21 nt, RNAi
augugaagaucacaugcuuuu

SEQ ID NO: 41805 - RNA, 21 nt, RNAi
uuuacacuucuaguguacgaa

SEQ ID NO: 41806 - DNA, 21 bp, homo sapiens
gaagatcacatgcttagtcat

SEQ ID NO: 41807 - RNA, 21 nt, RNAi
agaucacaugcuuagucauuu

SEQ ID NO: 41808 - RNA, 21 nt, RNAi
uuucuaguguacgaaucagua

SEQ ID NO: 41809 - DNA, 21 bp, homo sapiens
gatcacatgcttagtcatttc

SEQ ID NO: 41810 - RNA, 21 nt, RNAi
ucacaugcuuagucauuucuu

SEQ ID NO: 41811 - RNA, 21 nt, RNAi
uuaguguacgaaucaguaaag

SEQ ID NO: 41812 - DNA, 21 bp, homo sapiens
gacttctcatgttctagagag

SEQ ID NO: 41813 - RNA, 21 nt, RNAi
cuucucauguucuagagaguu

SEQ ID NO: 41814 - RNA, 21 nt, RNAi
uugaagaguacaagaucucuc

SEQ ID NO: 41815 - DNA, 21 bp, homo sapiens
gaaatgcagtttaaccacagt

SEQ ID NO: 41816 - RNA, 21 nt, RNAi
aaugcaguuuaaccacaguuu

SEQ ID NO: 41817 - RNA, 21 nt, RNAi
uuuuacgucaaauugguguca

SEQ ID NO: 41818 - DNA, 21 bp, homo sapiens
gacacttaagtacatgcttaa

SEQ ID NO: 41819 - RNA, 21 nt, RNAi
cacuuaaguacaugcuuaauu

SEQ ID NO: 41820 - RNA, 21 nt, RNAi
uugugaauucauguacgaauu

SEQ ID NO: 41821 - DNA, 21 bp, homo sapiens
tatcttggcgctaaagcggag

SEQ ID NO: 41822 - RNA, 21 nt, RNAi
ucuuggcgcuaaagcggaguu

SEQ ID NO: 41823 - RNA, 21 nt, RNAi
uuagaaccgcgauuucgccuc

SEQ ID NO: 41824 - DNA, 21 bp, homo sapiens
tatccagtagagatcagagag

SEQ ID NO: 41825 - RNA, 21 nt, RNAi
uccaguagagaucagagaguu

SEQ ID NO: 41826 - RNA, 21 nt, RNAi
uuaggucaucucuagucucuc

SEQ ID NO: 41827 - DNA, 21 bp, homo sapiens
tagagatcagagagttgtgac

SEQ ID NO: 41828 - RNA, 21 nt, RNAi
gagaucagagaguugugacuu

SEQ ID NO: 41829 - RNA, 21 nt, RNAi
uucucuagucucucaacacug

SEQ ID NO: 41830 - DNA, 21 bp, homo sapiens
taaggatagtaatcaaactcc

SEQ ID NO: 41831 - RNA, 21 nt, RNAi
aggauaguaaucaaacuccuu

SEQ ID NO: 41832 - RNA, 21 nt, RNAi
uuuccuaucauuaguuugagg

SEQ ID NO: 41833 - DNA, 21 bp, homo sapiens
tagtaatcaaactccgcattt

SEQ ID NO: 41834 - RNA, 21 nt, RNAi
guaaucaaacuccgcauuuuu

SEQ ID NO: 41835 - RNA, 21 nt, RNAi
uucauuaguuugaggcguaaa

SEQ ID NO: 41836 - DNA, 21 bp, homo sapiens
taatcaaactccgcatttgtt

SEQ ID NO: 41837 - RNA, 21 nt, RNAi
aucaaacuccgcauuuguuuu

SEQ ID NO: 41838 - RNA, 21 nt, RNAi
uuuaguuugaggcguaaacaa

SEQ ID NO: 41839 - DNA, 21 bp, homo sapiens
tatgacattaagccaggcatt

SEQ ID NO: 41840 - RNA, 21 nt, RNAi
ugacauuaagccaggcauuuu

SEQ ID NO: 41841 - RNA, 21 nt, RNAi
uuacuguaauucgguccguaa

SEQ ID NO: 41842 - DNA, 21 bp, homo sapiens
taagccaggcatttcacctta

SEQ ID NO: 41843 - RNA, 21 nt, RNAi
agccaggcauuucaccuuauu

SEQ ID NO: 41844 - RNA, 21 nt, RNAi
uuucgguccguaaaguggaau

SEQ ID NO: 41845 - DNA, 21 bp, homo sapiens
tatcgtggccagattgttcag

SEQ ID NO: 41846 - RNA, 21 nt, RNAi
ucguggccagauuguucaguu

SEQ ID NO: 41847 - RNA, 21 nt, RNAi
uuagcaccggucuaacaaguc

SEQ ID NO: 41848 - DNA, 21 bp, homo sapiens
tacaagtcaaagatgagagtt

SEQ ID NO: 41849 - RNA, 21 nt, RNAi
caagucaaagaugagaguuuu

SEQ ID NO: 41850 - RNA, 21 nt, RNAi
uuguucaguuucuacucucaa

SEQ ID NO: 41851 - DNA, 21 bp, homo sapiens
taaacaccagcagtgtaacag

SEQ ID NO: 41852 - RNA, 21 nt, RNAi
aacaccagcaguguaacaguu

SEQ ID NO: 41853 - RNA, 21 nt, RNAi
uuuuguggucgucacauuguc

SEQ ID NO: 41854 - DNA, 21 bp, homo sapiens
taatagatcctccaatatgac

SEQ ID NO: 41855 - RNA, 21 nt, RNAi
auagauccuccaauaugacuu

SEQ ID NO: 41856 - RNA, 21 nt, RNAi
uuuaucuaggagguuauacug

SEQ ID NO: 41857 - DNA, 21 bp, homo sapiens
tagatcctccaatatgactgc

SEQ ID NO: 41858 - RNA, 21 nt, RNAi
gauccuccaauaugacugcuu

SEQ ID NO: 41859 - RNA, 21 nt, RNAi
uucuaggagguuauacugacg

SEQ ID NO: 41860 - DNA, 21 bp, homo sapiens
tatgactgccactactaaatt

SEQ ID NO: 41861 - RNA, 21 nt, RNAi
ugacugccacuacuaaauuuu

SEQ ID NO: 41862 - RNA, 21 nt, RNAi
uuacugacggugaugauuuaa

SEQ ID NO: 41863 - DNA, 21 bp, homo sapiens
tactaaatttgtgagcactac

SEQ ID NO: 41864 - RNA, 21 nt, RNAi
cuaaauuugugagcacuacuu

SEQ ID NO: 41865 - RNA, 21 nt, RNAi
uugauuuaaacacucgugaug

SEQ ID NO: 41866 - DNA, 21 bp, homo sapiens
taaatttgtgagcactacatc

SEQ ID NO: 41867 - RNA, 21 nt, RNAi
aauuugugagcacuacaucuu

SEQ ID NO: 41868 - RNA, 21 nt, RNAi
uuuuaaacacucgugauguag

SEQ ID NO: 41869 - DNA, 21 bp, homo sapiens
tacatctcagaacacacaact

SEQ ID NO: 41870 - RNA, 21 nt, RNAi
caucucagaacacacaacuuu

SEQ ID NO: 41871 - RNA, 21 nt, RNAi
uuguagagucuuguguguuga

SEQ ID NO: 41872 - DNA, 21 bp, homo sapiens
tagaagtcatcacagtaatac

SEQ ID NO: 41873 - RNA, 21 nt, RNAi
gaagucaucacaguaauacuu

SEQ ID NO: 41874 - RNA, 21 nt, RNAi
uucuucaguagugucauuaug

SEQ ID NO: 41875 - DNA, 21 bp, homo sapiens
tagaacctctgccaatgttac

SEQ ID NO: 41876 - RNA, 21 nt, RNAi
gaaccucugccaauguuacuu

SEQ ID NO: 41877 - RNA, 21 nt, RNAi
uucuuggagacgguuacaaug

SEQ ID NO: 41878 - DNA, 21 bp, homo sapiens
taagactctatcaagatccat

SEQ ID NO: 41879 - RNA, 21 nt, RNAi
agacucuaucaagauccauuu

SEQ ID NO: 41880 - RNA, 21 nt, RNAi
uuucugagauaguucuaggua

SEQ ID NO: 41881 - DNA, 21 bp, homo sapiens
tatcaagatccatagcatctg

SEQ ID NO: 41882 - RNA, 21 nt, RNAi
ucaagauccauagcaucuguu

SEQ ID NO: 41883 - RNA, 21 nt, RNAi
uuaguucuagguaucguagac

SEQ ID NO: 41884 - DNA, 21 bp, homo sapiens
tagcatctgaagttgtagcca

SEQ ID NO: 41885 - RNA, 21 nt, RNAi
gcaucugaaguuguagccauu

SEQ ID NO: 41886 - RNA, 21 nt, RNAi
uucguagacuucaacaucggu

SEQ ID NO: 41887 - DNA, 21 bp, homo sapiens
tagccaggcctgcttcattgt

SEQ ID NO: 41888 - RNA, 21 nt, RNAi
gccaggccugcuucauuguuu

SEQ ID NO: 41889 - RNA, 21 nt, RNAi
uucgguccggacgaaguaaca

SEQ ID NO: 41890 - DNA, 21 bp, homo sapiens
taattcagtagttactcagca

SEQ ID NO: 41891 - RNA, 21 nt, RNAi
auucaguaguuacucagcauu

SEQ ID NO: 41892 - RNA, 21 nt, RNAi
uuuaagucaucaaugagucgu

SEQ ID NO: 41893 - DNA, 21 bp, homo sapiens
tagttactcagcatgagcctg

SEQ ID NO: 41894 - RNA, 21 nt, RNAi
guuacucagcaugagccuguu

SEQ ID NO: 41895 - RNA, 21 nt, RNAi
uucaaugagucguacucggac

SEQ ID NO: 41896 - DNA, 21 bp, homo sapiens
tactcagcatgagcctgcagg

SEQ ID NO: 41897 - RNA, 21 nt, RNAi
cucagcaugagccugcagguu

SEQ ID NO: 41898 - RNA, 21 nt, RNAi
uugagucguacucggacgucc

SEQ ID NO: 41899 - DNA, 21 bp, homo sapiens
taccatggcagaagaagatga

SEQ ID NO: 41900 - RNA, 21 nt, RNAi
ccauggcagaagaagaugauu

SEQ ID NO: 41901 - RNA, 21 nt, RNAi
uugguaccgucuucuucuacu

SEQ ID NO: 41902 - DNA, 21 bp, homo sapiens
tatactggtcacactgaatga

SEQ ID NO: 41903 - RNA, 21 nt, RNAi
uacuggucacacugaaugauu

SEQ ID NO: 41904 - RNA, 21 nt, RNAi
uuaugaccagugugacuuacu

SEQ ID NO: 41905 - DNA, 21 bp, homo sapiens
tactggtcacactgaatgacc

SEQ ID NO: 41906 - RNA, 21 nt, RNAi
cuggucacacugaaugaccuu

SEQ ID NO: 41907 - RNA, 21 nt, RNAi
uugaccagugugacuuacugg

SEQ ID NO: 41908 - DNA, 21 bp, homo sapiens
taagtattggatatgtcttgc

SEQ ID NO: 41909 - RNA, 21 nt, RNAi
aguauuggauaugucuugcuu

SEQ ID NO: 41910 - RNA, 21 nt, RNAi
uuucauaaccuauacagaacg

SEQ ID NO: 41911 - DNA, 21 bp, homo sapiens
tattggatatgtcttgcactt

SEQ ID NO: 41912 - RNA, 21 nt, RNAi
uuggauaugucuugcacuuuu

SEQ ID NO: 41913 - RNA, 21 nt, RNAi
uuaaccuauacagaacgugaa

SEQ ID NO: 41914 - DNA, 21 bp, homo sapiens
tatgtcttgcacttattgaac

SEQ ID NO: 41915 - RNA, 21 nt, RNAi
ugucuugcacuuauugaacuu

SEQ ID NO: 41916 - RNA, 21 nt, RNAi
uuacagaacgugaauaacuug

SEQ ID NO: 41917 - DNA, 21 bp, homo sapiens
tattgaaccaatcacaagtcc

SEQ ID NO: 41918 - RNA, 21 nt, RNAi
uugaaccaaucacaaguccuu

SEQ ID NO: 41919 - RNA, 21 nt, RNAi
uuaacuugguuaguguucagg

SEQ ID NO: 41920 - DNA, 21 bp, homo sapiens
tattgcaatctatgagaaagc

SEQ ID NO: 41921 - RNA, 21 nt, RNAi
uugcaaucuaugagaaagcuu

SEQ ID NO: 41922 - RNA, 21 nt, RNAi
uuaacguuagauacucuuucg

SEQ ID NO: 41923 - DNA, 21 bp, homo sapiens
tatgagaaagccattctggca

SEQ ID NO: 41924 - RNA, 21 nt, RNAi
ugagaaagccauucuggcauu

SEQ ID NO: 41925 - RNA, 21 nt, RNAi
uuacucuuucgguaagaccgu

SEQ ID NO: 41926 - DNA, 21 bp, homo sapiens
tattgaagagatgcgacacac

SEQ ID NO: 41927 - RNA, 21 nt, RNAi
uugaagagaugcgacacacuu

SEQ ID NO: 41928 - RNA, 21 nt, RNAi
uuaacuucucuacgcugugug

SEQ ID NO: 41929 - DNA, 21 bp, homo sapiens
tatggagaagtcttgtgcaag

SEQ ID NO: 41930 - RNA, 21 nt, RNAi
uggagaagucuugugcaaguu

SEQ ID NO: 41931 - RNA, 21 nt, RNAi
uuaccucuucagaacacguuc

SEQ ID NO: 41932 - DNA, 21 bp, homo sapiens
tattgaagatacaggtgttga

SEQ ID NO: 41933 - RNA, 21 nt, RNAi
uugaagauacagguguugauu

SEQ ID NO: 41934 - RNA, 21 nt, RNAi
uuaacuucuauguccacaacu

SEQ ID NO: 41935 - DNA, 21 bp, homo sapiens
tacaggtgttgatgtagatcc

SEQ ID NO: 41936 - RNA, 21 nt, RNAi
cagguguugauguagauccuu

SEQ ID NO: 41937 - RNA, 21 nt, RNAi
uuguccacaacuacaucuagg

SEQ ID NO: 41938 - DNA, 21 bp, homo sapiens
tacagaaacgaggacaagttg

SEQ ID NO: 41939 - RNA, 21 nt, RNAi
cagaaacgaggacaaguuguu

SEQ ID NO: 41940 - RNA, 21 nt, RNAi
uugucuuugcuccuguucaac

SEQ ID NO: 41941 - DNA, 21 bp, homo sapiens
tataatgtgtctactacgcca

SEQ ID NO: 41942 - RNA, 21 nt, RNAi
uaaugugucuacuacgccauu

SEQ ID NO: 41943 - RNA, 21 nt, RNAi
uuauuacacagaugaugcggu

SEQ ID NO: 41944 - DNA, 21 bp, homo sapiens
taatgtgtctactacgccata

SEQ ID NO: 41945 - RNA, 21 nt, RNAi
augugucuacuacgccauauu

SEQ ID NO: 41946 - RNA, 21 nt, RNAi
uuuacacagaugaugcgguau

SEQ ID NO: 41947 - DNA, 21 bp, homo sapiens
tactacgccatacttgcaaag

SEQ ID NO: 41948 - RNA, 21 nt, RNAi
cuacgccauacuugcaaaguu

SEQ ID NO: 41949 - RNA, 21 nt, RNAi
uugaugcgguaugaacguuuc

SEQ ID NO: 41950 - DNA, 21 bp, homo sapiens
tacgccatacttgcaaagtgt

SEQ ID NO: 41951 - RNA, 21 nt, RNAi
cgccauacuugcaaaguguuu

SEQ ID NO: 41952 - RNA, 21 nt, RNAi
uugcgguaugaacguuucaca

SEQ ID NO: 41953 - DNA, 21 bp, homo sapiens
taacaccagtgagacgttctc

SEQ ID NO: 41954 - RNA, 21 nt, RNAi
acaccagugagacguucucuu

SEQ ID NO: 41955 - RNA, 21 nt, RNAi
uuuguggucacucugcaagag

SEQ ID NO: 41956 - DNA, 21 bp, homo sapiens
tatccttgtgtgtcttcattg

SEQ ID NO: 41957 - RNA, 21 nt, RNAi
uccuugugugucuucauuguu

SEQ ID NO: 41958 - RNA, 21 nt, RNAi
uuaggaacacacagaaguaac

SEQ ID NO: 41959 - DNA, 21 bp, homo sapiens
tactatgaggctgatacaaca

SEQ ID NO: 41960 - RNA, 21 nt, RNAi
cuaugaggcugauacaacauu

SEQ ID NO: 41961 - RNA, 21 nt, RNAi
uugauacuccgacuauguugu

SEQ ID NO: 41962 - DNA, 21 bp, homo sapiens
tatgaggctgatacaacataa

SEQ ID NO: 41963 - RNA, 21 nt, RNAi
ugaggcugauacaacauaauu

SEQ ID NO: 41964 - RNA, 21 nt, RNAi
uuacuccgacuauguuguauu

SEQ ID NO: 41965 - DNA, 21 bp, homo sapiens
tagctttatattgctcttagg

SEQ ID NO: 41966 - RNA, 21 nt, RNAi
gcuuuauauugcucuuagguu

SEQ ID NO: 41967 - RNA, 21 nt, RNAi
uucgaaauauaacgagaaucc

SEQ ID NO: 41968 - DNA, 21 bp, homo sapiens
tatattgctcttaggtctgga

SEQ ID NO: 41969 - RNA, 21 nt, RNAi
uauugcucuuaggucuggauu

SEQ ID NO: 41970 - RNA, 21 nt, RNAi
uuauaacgagaauccagaccu

SEQ ID NO: 41971 - DNA, 21 bp, homo sapiens
tattgctcttaggtctggagt

SEQ ID NO: 41972 - RNA, 21 nt, RNAi
uugcucuuaggucuggaguuu

SEQ ID NO: 41973 - RNA, 21 nt, RNAi
uuaacgagaauccagaccuca

SEQ ID NO: 41974 - DNA, 21 bp, homo sapiens
taggtctggagttggccatgt

SEQ ID NO: 41975 - RNA, 21 nt, RNAi
ggucuggaguuggccauguuu

SEQ ID NO: 41976 - RNA, 21 nt, RNAi
uuccagaccucaaccgguaca

SEQ ID NO: 41977 - DNA, 21 bp, homo sapiens
tacctatgtatcctaagcatt

SEQ ID NO: 41978 - RNA, 21 nt, RNAi
ccuauguauccuaagcauuuu

SEQ ID NO: 41979 - RNA, 21 nt, RNAi
uuggauacauaggauucguaa

SEQ ID NO: 41980 - DNA, 21 bp, homo sapiens
tatgtatcctaagcattcacg

SEQ ID NO: 41981 - RNA, 21 nt, RNAi
uguauccuaagcauucacguu

SEQ ID NO: 41982 - RNA, 21 nt, RNAi
uuacauaggauucguaagugc

SEQ ID NO: 41983 - DNA, 21 bp, homo sapiens
tatcctaagcattcacggcag

SEQ ID NO: 41984 - RNA, 21 nt, RNAi
uccuaagcauucacggcaguu

SEQ ID NO: 41985 - RNA, 21 nt, RNAi
uuaggauucguaagugccguc

SEQ ID NO: 41986 - DNA, 21 bp, homo sapiens
taagcattcacggcagtgagc

SEQ ID NO: 41987 - RNA, 21 nt, RNAi
agcauucacggcagugagcuu

SEQ ID NO: 41988 - RNA, 21 nt, RNAi
uuucguaagugccgucacucg

SEQ ID NO: 41989 - DNA, 21 bp, homo sapiens
tactaacattcatgttatggc

SEQ ID NO: 41990 - RNA, 21 nt, RNAi
cuaacauucauguuauggcuu

SEQ ID NO: 41991 - RNA, 21 nt, RNAi
uugauuguaaguacaauaccg

SEQ ID NO: 41992 - DNA, 21 bp, homo sapiens
taacattcatgttatggcaag

SEQ ID NO: 41993 - RNA, 21 nt, RNAi
acauucauguuauggcaaguu

SEQ ID NO: 41994 - RNA, 21 nt, RNAi
uuuguaaguacaauaccguuc

SEQ ID NO: 41995 - DNA, 21 bp, homo sapiens
tatggcaagagttgtcctcta

SEQ ID NO: 41996 - RNA, 21 nt, RNAi
uggcaagaguuguccucuauu

SEQ ID NO: 41997 - RNA, 21 nt, RNAi
uuaccguucucaacaggagau

SEQ ID NO: 41998 - DNA, 21 bp, homo sapiens
tacattggaaagctaatccta

SEQ ID NO: 41999 - RNA, 21 nt, RNAi
cauuggaaagcuaauccuauu

SEQ ID NO: 42000 - RNA, 21 nt, RNAi
uuguaaccuuucgauuaggau

SEQ ID NO: 42001 - DNA, 21 bp, homo sapiens
taatcctaccttgtcagtttc

SEQ ID NO: 42002 - RNA, 21 nt, RNAi
auccuaccuugucaguuucuu

SEQ ID NO: 42003 - RNA, 21 nt, RNAi
uuuaggauggaacagucaaag

SEQ ID NO: 42004 - DNA, 21 bp, homo sapiens
taccttgtcagtttcaaccaa

SEQ ID NO: 42005 - RNA, 21 nt, RNAi
ccuugucaguuucaaccaauu

SEQ ID NO: 42006 - RNA, 21 nt, RNAi
uuggaacagucaaaguugguu

SEQ ID NO: 42007 - DNA, 21 bp, homo sapiens
tatgtttgccttgacatgttt

SEQ ID NO: 42008 - RNA, 21 nt, RNAi
uguuugccuugacauguuuuu

SEQ ID NO: 42009 - RNA, 21 nt, RNAi
uuacaaacggaacuguacaaa

SEQ ID NO: 42010 - DNA, 21 bp, homo sapiens
tatagaatgactcacttcgaa

SEQ ID NO: 42011 - RNA, 21 nt, RNAi
uagaaugacucacuucgaauu

SEQ ID NO: 42012 - RNA, 21 nt, RNAi
uuaucuuacugagugaagcuu

SEQ ID NO: 42013 - DNA, 21 bp, homo sapiens
tagaatgactcacttcgaata

SEQ ID NO: 42014 - RNA, 21 nt, RNAi
gaaugacucacuucgaauauu

SEQ ID NO: 42015 - RNA, 21 nt, RNAi
uucuuacugagugaagcuuau

SEQ ID NO: 42016 - DNA, 21 bp, homo sapiens
tactaagacacaggaggttta

SEQ ID NO: 42017 - RNA, 21 nt, RNAi
cuaagacacaggagguuuauu

SEQ ID NO: 42018 - RNA, 21 nt, RNAi
uugauucuguguccuccaaau

SEQ ID NO: 42019 - DNA, 21 bp, homo sapiens
taagacacaggaggtttagcc

SEQ ID NO: 42020 - RNA, 21 nt, RNAi
agacacaggagguuuagccuu

SEQ ID NO: 42021 - RNA, 21 nt, RNAi
uuucuguguccuccaaaucgg

SEQ ID NO: 42022 - DNA, 21 bp, homo sapiens
tagcctgctttcttaccaaat

SEQ ID NO: 42023 - RNA, 21 nt, RNAi
gccugcuuucuuaccaaauuu

SEQ ID NO: 42024 - RNA, 21 nt, RNAi
uucggacgaaagaaugguuua

SEQ ID NO: 42025 - DNA, 21 bp, homo sapiens
tagtctgtagtttcgtggcct

SEQ ID NO: 42026 - RNA, 21 nt, RNAi
gucuguaguuucguggccuuu

SEQ ID NO: 42027 - RNA, 21 nt, RNAi
uucagacaucaaagcaccgga

SEQ ID NO: 42028 - DNA, 21 bp, homo sapiens
taaataccgcatttctaagag

SEQ ID NO: 42029 - RNA, 21 nt, RNAi
aauaccgcauuucuaagaguu

SEQ ID NO: 42030 - RNA, 21 nt, RNAi
uuuuauggcguaaagauucuc

SEQ ID NO: 42031 - DNA, 21 bp, homo sapiens
taccgcatttctaagagaaga

SEQ ID NO: 42032 - RNA, 21 nt, RNAi
ccgcauuucuaagagaagauu

SEQ ID NO: 42033 - RNA, 21 nt, RNAi
uuggcguaaagauucucuucu

SEQ ID NO: 42034 - DNA, 21 bp, homo sapiens
taaggttccaaactaatatgg

SEQ ID NO: 42035 - RNA, 21 nt, RNAi
agguuccaaacuaauaugguu

SEQ ID NO: 42036 - RNA, 21 nt, RNAi
uuuccaagguuugauuauacc

SEQ ID NO: 42037 - DNA, 21 bp, homo sapiens
tatggcatatatcaactctac

SEQ ID NO: 42038 - RNA, 21 nt, RNAi
uggcauauaucaacucuacuu

SEQ ID NO: 42039 - RNA, 21 nt, RNAi
uuaccguauauaguugagaug

SEQ ID NO: 42040 - DNA, 21 bp, homo sapiens
tatgaatgtgaagatcacatg

SEQ ID NO: 42041 - RNA, 21 nt, RNAi
ugaaugugaagaucacauguu

SEQ ID NO: 42042 - RNA, 21 nt, RNAi
uuacuuacacuucuaguguac

SEQ ID NO: 42043 - DNA, 21 bp, homo sapiens
tattgacttctcatgttctag

SEQ ID NO: 42044 - RNA, 21 nt, RNAi
uugacuucucauguucuaguu

SEQ ID NO: 42045 - RNA, 21 nt, RNAi
uuaacugaagaguacaagauc

SEQ ID NO: 42046 - DNA, 21 bp, homo sapiens
tattccgtgtacctgatatat

SEQ ID NO: 42047 - RNA, 21 nt, RNAi
uuccguguaccugauauauuu

SEQ ID NO: 42048 - RNA, 21 nt, RNAi
uuaaggcacauggacuauaua

SEQ ID NO: 42049 - DNA, 21 bp, homo sapiens
tatgaaatgcagtttaaccac

SEQ ID NO: 42050 - RNA, 21 nt, RNAi
ugaaaugcaguuuaaccacuu

SEQ ID NO: 42051 - RNA, 21 nt, RNAi
uuacuuuacgucaaauuggug

SEQ ID NO: 42052 - DNA, 21 bp, homo sapiens
aaatgagatgttatccagtag

SEQ ID NO: 42053 - RNA, 21 nt, RNAi
augagauguuauccaguaguu

SEQ ID NO: 42054 - RNA, 21 nt, RNAi
uuuacucuacaauaggucauc

SEQ ID NO: 42055 - DNA, 21 bp, homo sapiens
aaacatgaagagacctgcaga

SEQ ID NO: 42056 - RNA, 21 nt, RNAi
acaugaagagaccugcagauu

SEQ ID NO: 42057 - RNA, 21 nt, RNAi
uuuguacuucucuggacgucu

SEQ ID NO: 42058 - DNA, 21 bp, homo sapiens
aactgtagtaattgacacaca

SEQ ID NO: 42059 - RNA, 21 nt, RNAi
cuguaguaauugacacacauu

SEQ ID NO: 42060 - RNA, 21 nt, RNAi
uugacaucauuaacugugugu

SEQ ID NO: 42061 - DNA, 21 bp, homo sapiens
aaggatagtaatcaaactccg

SEQ ID NO: 42062 - RNA, 21 nt, RNAi
ggauaguaaucaaacuccguu

SEQ ID NO: 42063 - RNA, 21 nt, RNAi
uuccuaucauuaguuugaggc

SEQ ID NO: 42064 - DNA, 21 bp, homo sapiens
aatcaaactccgcatttgtta

SEQ ID NO: 42065 - RNA, 21 nt, RNAi
ucaaacuccgcauuuguuauu

SEQ ID NO: 42066 - RNA, 21 nt, RNAi
uuaguuugaggcguaaacaau

SEQ ID NO: 42067 - DNA, 21 bp, homo sapiens
aaactccgcatttgttactaa

SEQ ID NO: 42068 - RNA, 21 nt, RNAi
acuccgcauuuguuacuaauu

SEQ ID NO: 42069 - RNA, 21 nt, RNAi
uuugaggcguaaacaaugauu

SEQ ID NO: 42070 - DNA, 21 bp, homo sapiens
aactccgcatttgttactaac

SEQ ID NO: 42071 - RNA, 21 nt, RNAi
cuccgcauuuguuacuaacuu

SEQ ID NO: 42072 - RNA, 21 nt, RNAi
uugaggcguaaacaaugauug

SEQ ID NO: 42073 - DNA, 21 bp, homo sapiens
aacatatgacattaagccagg

SEQ ID NO: 42074 - RNA, 21 nt, RNAi
cauaugacauuaagccagguu

SEQ ID NO: 42075 - RNA, 21 nt, RNAi
uuguauacuguaauucggucc

SEQ ID NO: 42076 - DNA, 21 bp, homo sapiens
aatatgactgccactactaaa

SEQ ID NO: 42077 - RNA, 21 nt, RNAi
uaugacugccacuacuaaauu

SEQ ID NO: 42078 - RNA, 21 nt, RNAi
uuauacugacggugaugauuu

SEQ ID NO: 42079 - DNA, 21 bp, homo sapiens
aaatttgtgagcactacatct

SEQ ID NO: 42080 - RNA, 21 nt, RNAi
auuugugagcacuacaucuuu

SEQ ID NO: 42081 - RNA, 21 nt, RNAi
uuuaaacacucgugauguaga

SEQ ID NO: 42082 - DNA, 21 bp, homo sapiens
aatttgtgagcactacatctc

SEQ ID NO: 42083 - RNA, 21 nt, RNAi
uuugugagcacuacaucucuu

SEQ ID NO: 42084 - RNA, 21 nt, RNAi
uuaaacacucgugauguagag

SEQ ID NO: 42085 - DNA, 21 bp, homo sapiens
aataagactctatcaagatcc

SEQ ID NO: 42086 - RNA, 21 nt, RNAi
uaagacucuaucaagauccuu

SEQ ID NO: 42087 - RNA, 21 nt, RNAi
uuauucugagauaguucuagg

SEQ ID NO: 42088 - DNA, 21 bp, homo sapiens
aagatccatagcatctgaagt

SEQ ID NO: 42089 - RNA, 21 nt, RNAi
gauccauagcaucugaaguuu

SEQ ID NO: 42090 - RNA, 21 nt, RNAi
uucuagguaucguagacuuca

SEQ ID NO: 42091 - DNA, 21 bp, homo sapiens
aattgttgatagtagatcagc

SEQ ID NO: 42092 - RNA, 21 nt, RNAi
uuguugauaguagaucagcuu

SEQ ID NO: 42093 - RNA, 21 nt, RNAi
uuaacaacuaucaucuagucg

SEQ ID NO: 42094 - DNA, 21 bp, homo sapiens
aattcagtagttactcagcat

SEQ ID NO: 42095 - RNA, 21 nt, RNAi
uucaguaguuacucagcauuu

SEQ ID NO: 42096 - RNA, 21 nt, RNAi
uuaagucaucaaugagucgua

SEQ ID NO: 42097 - DNA, 21 bp, homo sapiens
aagagatgcgacacacgattg

SEQ ID NO: 42098 - RNA, 21 nt, RNAi
gagaugcgacacacgauuguu

SEQ ID NO: 42099 - RNA, 21 nt, RNAi
uucucuacgcugugugcuaac

SEQ ID NO: 42100 - DNA, 21 bp, homo sapiens
aaatatggagaagtcttgtgc

SEQ ID NO: 42101 - RNA, 21 nt, RNAi
auauggagaagucuugugcuu

SEQ ID NO: 42102 - RNA, 21 nt, RNAi
uuuauaccucuucagaacacg

SEQ ID NO: 42103 - DNA, 21 bp, homo sapiens
aatatggagaagtcttgtgca

SEQ ID NO: 42104 - RNA, 21 nt, RNAi
uauggagaagucuugugcauu

SEQ ID NO: 42105 - RNA, 21 nt, RNAi
uuauaccucuucagaacacgu

SEQ ID NO: 42106 - DNA, 21 bp, homo sapiens
aagtcagtattgaagatacag

SEQ ID NO: 42107 - RNA, 21 nt, RNAi
gucaguauugaagauacaguu

SEQ ID NO: 42108 - RNA, 21 nt, RNAi
uucagucauaacuucuauguc

SEQ ID NO: 42109 - DNA, 21 bp, homo sapiens
aagatacaggtgttgatgtag

SEQ ID NO: 42110 - RNA, 21 nt, RNAi
gauacagguguugauguaguu

SEQ ID NO: 42111 - RNA, 21 nt, RNAi
uucuauguccacaacuacauc

SEQ ID NO: 42112 - DNA, 21 bp, homo sapiens
aatggagagtaaacttcatag

SEQ ID NO: 42113 - RNA, 21 nt, RNAi
uggagaguaaacuucauaguu

SEQ ID NO: 42114 - RNA, 21 nt, RNAi
uuaccucucauuugaaguauc

SEQ ID NO: 42115 - DNA, 21 bp, homo sapiens
aatacagaaacgaggacaagt

SEQ ID NO: 42116 - RNA, 21 nt, RNAi
uacagaaacgaggacaaguuu

SEQ ID NO: 42117 - RNA, 21 nt, RNAi
uuaugucuuugcuccuguuca

SEQ ID NO: 42118 - DNA, 21 bp, homo sapiens
aatataatgtgtctactacgc

SEQ ID NO: 42119 - RNA, 21 nt, RNAi
uauaaugugucuacuacgcuu

SEQ ID NO: 42120 - RNA, 21 nt, RNAi
uuauauuacacagaugaugcg

SEQ ID NO: 42121 - DNA, 21 bp, homo sapiens
aaggtgcagtttgatggaaca

SEQ ID NO: 42122 - RNA, 21 nt, RNAi
ggugcaguuugauggaacauu

SEQ ID NO: 42123 - RNA, 21 nt, RNAi
uuccacgucaaacuaccuugu

SEQ ID NO: 42124 - DNA, 21 bp, homo sapiens
aaattccgcatttaaagagct

SEQ ID NO: 42125 - RNA, 21 nt, RNAi
auuccgcauuuaaagagcuuu

SEQ ID NO: 42126 - RNA, 21 nt, RNAi
uuuaaggcguaaauuucucga

SEQ ID NO: 42127 - DNA, 21 bp, homo sapiens
cagagagttgtgacatctgag

SEQ ID NO: 42128 - RNA, 21 nt, RNAi
gagaguugugacaucugaguu

SEQ ID NO: 42129 - RNA, 21 nt, RNAi
uucucucaacacuguagacuc

SEQ ID NO: 42130 - DNA, 21 bp, homo sapiens
caaactccgcatttgttacta

SEQ ID NO: 42131 - RNA, 21 nt, RNAi
aacuccgcauuuguuacuauu

SEQ ID NO: 42132 - RNA, 21 nt, RNAi
uuuugaggcguaaacaaugau

SEQ ID NO: 42133 - DNA, 21 bp, homo sapiens
caacatatgacattaagccag

SEQ ID NO: 42134 - RNA, 21 nt, RNAi
acauaugacauuaagccaguu

SEQ ID NO: 42135 - RNA, 21 nt, RNAi
uuuguauacuguaauucgguc

SEQ ID NO: 42136 - DNA, 21 bp, homo sapiens
catatgacattaagccaggca

SEQ ID NO: 42137 - RNA, 21 nt, RNAi
uaugacauuaagccaggcauu

SEQ ID NO: 42138 - RNA, 21 nt, RNAi
uuauacuguaauucgguccgu

SEQ ID NO: 42139 - DNA, 21 bp, homo sapiens
caatatgactgccactactaa

SEQ ID NO: 42140 - RNA, 21 nt, RNAi
auaugacugccacuacuaauu

SEQ ID NO: 42141 - RNA, 21 nt, RNAi
uuuauacugacggugaugauu

SEQ ID NO: 42142 - DNA, 21 bp, homo sapiens
cactactaaatttgtgagcac

SEQ ID NO: 42143 - RNA, 21 nt, RNAi
cuacuaaauuugugagcacuu

SEQ ID NO: 42144 - RNA, 21 nt, RNAi
uugaugauuuaaacacucgug

SEQ ID NO: 42145 - DNA, 21 bp, homo sapiens
cactgtgaaacaaggcatcag

SEQ ID NO: 42146 - RNA, 21 nt, RNAi
cugugaaacaaggcaucaguu

SEQ ID NO: 42147 - RNA, 21 nt, RNAi
uugacacuuuguuccguaguc

SEQ ID NO: 42148 - DNA, 21 bp, homo sapiens
caatgttacaatccggaaagg

SEQ ID NO: 42149 - RNA, 21 nt, RNAi
auguuacaauccggaaagguu

SEQ ID NO: 42150 - RNA, 21 nt, RNAi
uuuacaauguuaggccuuucc

SEQ ID NO: 42151 - DNA, 21 bp, homo sapiens
caagatccatagcatctgaag

SEQ ID NO: 42152 - RNA, 21 nt, RNAi
agauccauagcaucugaaguu

SEQ ID NO: 42153 - RNA, 21 nt, RNAi
uuucuagguaucguagacuuc

SEQ ID NO: 42154 - DNA, 21 bp, homo sapiens
cagtagttactcagcatgagc

SEQ ID NO: 42155 - RNA, 21 nt, RNAi
guaguuacucagcaugagcuu

SEQ ID NO: 42156 - RNA, 21 nt, RNAi
uucaucaaugagucguacucg

SEQ ID NO: 42157 - DNA, 21 bp, homo sapiens
caggtgttgatgtagatccag

SEQ ID NO: 42158 - RNA, 21 nt, RNAi
gguguugauguagauccaguu

SEQ ID NO: 42159 - RNA, 21 nt, RNAi
uuccacaacuacaucuagguc

SEQ ID NO: 42160 - DNA, 21 bp, homo sapiens
caatacagaaacgaggacaag

SEQ ID NO: 42161 - RNA, 21 nt, RNAi
auacagaaacgaggacaaguu

SEQ ID NO: 42162 - RNA, 21 nt, RNAi
uuuaugucuuugcuccuguuc

SEQ ID NO: 42163 - DNA, 21 bp, homo sapiens
cagaaacgaggacaagttgct

SEQ ID NO: 42164 - RNA, 21 nt, RNAi
gaaacgaggacaaguugcuuu

SEQ ID NO: 42165 - RNA, 21 nt, RNAi
uucuuugcuccuguucaacga

SEQ ID NO: 42166 - DNA, 21 bp, homo sapiens
caaattccgcatttaaagagc

SEQ ID NO: 42167 - RNA, 21 nt, RNAi
aauuccgcauuuaaagagcuu

SEQ ID NO: 42168 - RNA, 21 nt, RNAi
uuuuaaggcguaaauuucucg

SEQ ID NO: 42169 - DNA, 21 bp, homo sapiens
cattggaacagctaacggagt

SEQ ID NO: 42170 - RNA, 21 nt, RNAi
uuggaacagcuaacggaguuu

SEQ ID NO: 42171 - RNA, 21 nt, RNAi
uuaaccuugucgauugccuca

SEQ ID NO: 42172 - DNA, 21 bp, homo sapiens
gagatcagagagttgtgacat

SEQ ID NO: 42173 - RNA, 21 nt, RNAi
gaucagagaguugugacauuu

SEQ ID NO: 42174 - RNA, 21 nt, RNAi
uucuagucucucaacacugua

SEQ ID NO: 42175 - DNA, 21 bp, homo sapiens
gatcagagagttgtgacatct

SEQ ID NO: 42176 - RNA, 21 nt, RNAi
ucagagaguugugacaucuuu

SEQ ID NO: 42177 - RNA, 21 nt, RNAi
uuagucucucaacacuguaga

SEQ ID NO: 42178 - DNA, 21 bp, homo sapiens
gatagtaatcaaactccgcat

SEQ ID NO: 42179 - RNA, 21 nt, RNAi
uaguaaucaaacuccgcauuu

SEQ ID NO: 42180 - RNA, 21 nt, RNAi
uuaucauuaguuugaggcgua

SEQ ID NO: 42181 - DNA, 21 bp, homo sapiens
gacattaagccaggcatttca

SEQ ID NO: 42182 - RNA, 21 nt, RNAi
cauuaagccaggcauuucauu

SEQ ID NO: 42183 - RNA, 21 nt, RNAi
uuguaauucgguccguaaagu

SEQ ID NO: 42184 - DNA, 21 bp, homo sapiens
gatcttatcgtggccagattg

SEQ ID NO: 42185 - RNA, 21 nt, RNAi
ucuuaucguggccagauuguu

SEQ ID NO: 42186 - RNA, 21 nt, RNAi
uuagaauagcaccggucuaac

SEQ ID NO: 42187 - DNA, 21 bp, homo sapiens
gactgccactactaaatttgt

SEQ ID NO: 42188 - RNA, 21 nt, RNAi
cugccacuacuaaauuuguuu

SEQ ID NO: 42189 - RNA, 21 nt, RNAi
uugacggugaugauuuaaaca

SEQ ID NO: 42190 - DNA, 21 bp, homo sapiens
gacctcctattagaagtcatc

SEQ ID NO: 42191 - RNA, 21 nt, RNAi
ccuccuauuagaagucaucuu

SEQ ID NO: 42192 - RNA, 21 nt, RNAi
uuggaggauaaucuucaguag

SEQ ID NO: 42193 - DNA, 21 bp, homo sapiens
gacactgtgaaacaaggcatc

SEQ ID NO: 42194 - RNA, 21 nt, RNAi
cacugugaaacaaggcaucuu

SEQ ID NO: 42195 - RNA, 21 nt, RNAi
uugugacacuuuguuccguag

SEQ ID NO: 42196 - DNA, 21 bp, homo sapiens
gaccagcgaagacatactgca

SEQ ID NO: 42197 - RNA, 21 nt, RNAi
ccagcgaagacauacugcauu

SEQ ID NO: 42198 - RNA, 21 nt, RNAi
uuggucgcuucuguaugacgu

SEQ ID NO: 42199 - DNA, 21 bp, homo sapiens
gagtgagtggaaagctggcaa

SEQ ID NO: 42200 - RNA, 21 nt, RNAi
gugaguggaaagcuggcaauu

SEQ ID NO: 42201 - RNA, 21 nt, RNAi
uucacucaccuuucgaccguu

SEQ ID NO: 42202 - DNA, 21 bp, homo sapiens
gaagagatgcgacacacgatt

SEQ ID NO: 42203 - RNA, 21 nt, RNAi
agagaugcgacacacgauuuu

SEQ ID NO: 42204 - RNA, 21 nt, RNAi
uuucucuacgcugugugcuaa

SEQ ID NO: 42205 - DNA, 21 bp, homo sapiens
gagatgcgacacacgattgta

SEQ ID NO: 42206 - RNA, 21 nt, RNAi
gaugcgacacacgauuguauu

SEQ ID NO: 42207 - RNA, 21 nt, RNAi
uucuacgcugugugcuaacau

SEQ ID NO: 42208 - DNA, 21 bp, homo sapiens
gatgcgacacacgattgtaga

SEQ ID NO: 42209 - RNA, 21 nt, RNAi
ugcgacacacgauuguagauu

SEQ ID NO: 42210 - RNA, 21 nt, RNAi
uuacgcugugugcuaacaucu

SEQ ID NO: 42211 - DNA, 21 bp, homo sapiens
gaagatacaggtgttgatgta

SEQ ID NO: 42212 - RNA, 21 nt, RNAi
agauacagguguugauguauu

SEQ ID NO: 42213 - RNA, 21 nt, RNAi
uuucuauguccacaacuacau

SEQ ID NO: 42214 - DNA, 21 bp, homo sapiens
gatacaggtgttgatgtagat

SEQ ID NO: 42215 - RNA, 21 nt, RNAi
uacagguguugauguagauuu

SEQ ID NO: 42216 - RNA, 21 nt, RNAi
uuauguccacaacuacaucua

SEQ ID NO: 42217 - DNA, 21 bp, homo sapiens
gaaacgaggacaagttgctta

SEQ ID NO: 42218 - RNA, 21 nt, RNAi
aacgaggacaaguugcuuauu

SEQ ID NO: 42219 - RNA, 21 nt, RNAi
uuuugcuccuguucaacgaau

SEQ ID NO: 42220 - DNA, 21 bp, homo sapiens
gacgttctcgacgtcttcaag

SEQ ID NO: 42221 - RNA, 21 nt, RNAi
cguucucgacgucuucaaguu

SEQ ID NO: 42222 - RNA, 21 nt, RNAi
uugcaagagcugcagaaguuc

SEQ ID NO: 42223 - DNA, 21 bp, homo sapiens
taaggatagtaatcaaactcc

SEQ ID NO: 42224 - RNA, 21 nt, RNAi
aggauaguaaucaaacuccuu

SEQ ID NO: 42225 - RNA, 21 nt, RNAi
uuuccuaucauuaguuugagg

SEQ ID NO: 42226 - DNA, 21 bp, homo sapiens
tagtaatcaaactccgcattt

SEQ ID NO: 42227 - RNA, 21 nt, RNAi
guaaucaaacuccgcauuuuu

SEQ ID NO: 42228 - RNA, 21 nt, RNAi
uucauuaguuugaggcguaaa

SEQ ID NO: 42229 - DNA, 21 bp, homo sapiens
taatcaaactccgcatttgtt

SEQ ID NO: 42230 - RNA, 21 nt, RNAi
aucaaacuccgcauuuguuuu

SEQ ID NO: 42231 - RNA, 21 nt, RNAi
uuuaguuugaggcguaaacaa

SEQ ID NO: 42232 - DNA, 21 bp, homo sapiens
tatgacattaagccaggcatt

SEQ ID NO: 42233 - RNA, 21 nt, RNAi
ugacauuaagccaggcauuuu

SEQ ID NO: 42234 - RNA, 21 nt, RNAi
uuacuguaauucgguccguaa

SEQ ID NO: 42235 - DNA, 21 bp, homo sapiens
tatgactgccactactaaatt

SEQ ID NO: 42236 - RNA, 21 nt, RNAi
ugacugccacuacuaaauuuu

SEQ ID NO: 42237 - RNA, 21 nt, RNAi
uuacugacggugaugauuuaa

SEQ ID NO: 42238 - DNA, 21 bp, homo sapiens
tactaaatttgtgagcactac

SEQ ID NO: 42239 - RNA, 21 nt, RNAi
cuaaauuugugagcacuacuu

SEQ ID NO: 42240 - RNA, 21 nt, RNAi
uugauuuaaacacucgugaug

SEQ ID NO: 42241 - DNA, 21 bp, homo sapiens
taaatttgtgagcactacatc

SEQ ID NO: 42242 - RNA, 21 nt, RNAi
aauuugugagcacuacaucuu

SEQ ID NO: 42243 - RNA, 21 nt, RNAi
uuuuaaacacucgugauguag

SEQ ID NO: 42244 - DNA, 21 bp, homo sapiens
taattcagtagttactcagca

SEQ ID NO: 42245 - RNA, 21 nt, RNAi
auucaguaguuacucagcauu

SEQ ID NO: 42246 - RNA, 21 nt, RNAi
uuuaagucaucaaugagucgu

SEQ ID NO: 42247 - DNA, 21 bp, homo sapiens
taagtattggatatgtcttgc

SEQ ID NO: 42248 - RNA, 21 nt, RNAi
aguauuggauaugucuugcuu

SEQ ID NO: 42249 - RNA, 21 nt, RNAi
uuucauaaccuauacagaacg

SEQ ID NO: 42250 - DNA, 21 bp, homo sapiens
tattgaagagatgcgacacac

SEQ ID NO: 42251 - RNA, 21 nt, RNAi
uugaagagaugcgacacacuu

SEQ ID NO: 42252 - RNA, 21 nt, RNAi
uuaacuucucuacgcugugug

SEQ ID NO: 42253 - DNA, 21 bp, homo sapiens
tatggagaagtcttgtgcaag

SEQ ID NO: 42254 - RNA, 21 nt, RNAi
uggagaagucuugugcaaguu

SEQ ID NO: 42255 - RNA, 21 nt, RNAi
uuaccucuucagaacacguuc

SEQ ID NO: 42256 - DNA, 21 bp, homo sapiens
tacaggtgttgatgtagatcc

SEQ ID NO: 42257 - RNA, 21 nt, RNAi
cagguguugauguagauccuu

SEQ ID NO: 42258 - RNA, 21 nt, RNAi
uuguccacaacuacaucuagg

SEQ ID NO: 42259 - DNA, 21 bp, homo sapiens
tacagaaacgaggacaagttg

SEQ ID NO: 42260 - RNA, 21 nt, RNAi
cagaaacgaggacaaguuguu

SEQ ID NO: 42261 - RNA, 21 nt, RNAi
uugucuuugcuccuguucaac

SEQ ID NO: 42262 - DNA, 21 bp, homo sapiens
tactacgccatacttgcaaag

SEQ ID NO: 42263 - RNA, 21 nt, RNAi
cuacgccauacuugcaaaguu

SEQ ID NO: 42264 - RNA, 21 nt, RNAi
uugaugcgguaugaacguuuc

SEQ ID NO: 42265 - DNA, 21 bp, homo sapiens
taacaccagtgagacgttctc

SEQ ID NO: 42266 - RNA, 21 nt, RNAi
acaccagugagacguucucuu

SEQ ID NO: 42267 - RNA, 21 nt, RNAi
uuuguggucacucugcaagag

SEQ ID NO: 42268 - DNA, 21 bp, homo sapiens
aagctccggaaatacatcgtc

SEQ ID NO: 42269 - RNA, 21 nt, RNAi
gcuccggaaauacaucgucuu

SEQ ID NO: 42270 - RNA, 21 nt, RNAi
uucgaggccuuuauguagcag

SEQ ID NO: 42271 - DNA, 21 bp, homo sapiens
aaatacatcgtcgccaggact

SEQ ID NO: 42272 - RNA, 21 nt, RNAi
auacaucgucgccaggacuuu

SEQ ID NO: 42273 - RNA, 21 nt, RNAi
uuuauguagcagcgguccuga

SEQ ID NO: 42274 - DNA, 21 bp, homo sapiens
aatacatcgtcgccaggactc

SEQ ID NO: 42275 - RNA, 21 nt, RNAi
uacaucgucgccaggacucuu

SEQ ID NO: 42276 - RNA, 21 nt, RNAi
uuauguagcagcgguccugag

SEQ ID NO: 42277 - DNA, 21 bp, homo sapiens
aaggtgtggaaaggactgttt

SEQ ID NO: 42278 - RNA, 21 nt, RNAi
gguguggaaaggacuguuuuu

SEQ ID NO: 42279 - RNA, 21 nt, RNAi
uuccacaccuuuccugacaaa

SEQ ID NO: 42280 - DNA, 21 bp, homo sapiens
aagccactcctccaggaagaa

SEQ ID NO: 42281 - RNA, 21 nt, RNAi
gccacuccuccaggaagaauu

SEQ ID NO: 42282 - RNA, 21 nt, RNAi
uucggugaggagguccuucuu

SEQ ID NO: 42283 - DNA, 21 bp, homo sapiens
aaattctacatgctcatgcgg

SEQ ID NO: 42284 - RNA, 21 nt, RNAi
auucuacaugcucaugcgguu

SEQ ID NO: 42285 - RNA, 21 nt, RNAi
uuuaagauguacgaguacgcc

SEQ ID NO: 42286 - DNA, 21 bp, homo sapiens
aattctacatgctcatgcgga

SEQ ID NO: 42287 - RNA, 21 nt, RNAi
uucuacaugcucaugcggauu

SEQ ID NO: 42288 - RNA, 21 nt, RNAi
uuaagauguacgaguacgccu

SEQ ID NO: 42289 - DNA, 21 bp, homo sapiens
aacgagtccttgaaggttctg

SEQ ID NO: 42290 - RNA, 21 nt, RNAi
cgaguccuugaagguucuguu

SEQ ID NO: 42291 - RNA, 21 nt, RNAi
uugcucaggaacuuccaagac

SEQ ID NO: 42292 - DNA, 21 bp, homo sapiens
aaggttctgaagatgcaaggc

SEQ ID NO: 42293 - RNA, 21 nt, RNAi
gguucugaagaugcaaggcuu

SEQ ID NO: 42294 - RNA, 21 nt, RNAi
uuccaagacuucuacguuccg

SEQ ID NO: 42295 - DNA, 21 bp, homo sapiens
aagaaagacagatcgaggagc

SEQ ID NO: 42296 - RNA, 21 nt, RNAi
gaaagacagaucgaggagcuu

SEQ ID NO: 42297 - RNA, 21 nt, RNAi
uucuuucugucuagcuccucg

SEQ ID NO: 42298 - DNA, 21 bp, homo sapiens
aaagacagatcgaggagctgc

SEQ ID NO: 42299 - RNA, 21 nt, RNAi
agacagaucgaggagcugcuu

SEQ ID NO: 42300 - RNA, 21 nt, RNAi
uuucugucuagcuccucgacg

SEQ ID NO: 42301 - DNA, 21 bp, homo sapiens
aagacagatcgaggagctgct

SEQ ID NO: 42302 - RNA, 21 nt, RNAi
gacagaucgaggagcugcuuu

SEQ ID NO: 42303 - RNA, 21 nt, RNAi
uucugucuagcuccucgacga

SEQ ID NO: 42304 - DNA, 21 bp, homo sapiens
aacggtgtgaagagccacttc

SEQ ID NO: 42305 - RNA, 21 nt, RNAi
cggugugaagagccacuucuu

SEQ ID NO: 42306 - RNA, 21 nt, RNAi
uugccacacuucucggugaag

SEQ ID NO: 42307 - DNA, 21 bp, homo sapiens
aagagccacttcatcgagatc

SEQ ID NO: 42308 - RNA, 21 nt, RNAi
gagccacuucaucgagaucuu

SEQ ID NO: 42309 - RNA, 21 nt, RNAi
uucucggugaaguagcucuag

SEQ ID NO: 42310 - DNA, 21 bp, homo sapiens
aacaacatcactcgaggcatc

SEQ ID NO: 42311 - RNA, 21 nt, RNAi
caacaucacucgaggcaucuu

SEQ ID NO: 42312 - RNA, 21 nt, RNAi
uuguuguagugagcuccguag

SEQ ID NO: 42313 - DNA, 21 bp, homo sapiens
aacatcactcgaggcatcttt

SEQ ID NO: 42314 - RNA, 21 nt, RNAi
caucacucgaggcaucuuuuu

SEQ ID NO: 42315 - RNA, 21 nt, RNAi
uuguagugagcuccguagaaa

SEQ ID NO: 42316 - DNA, 21 bp, homo sapiens
aagacctcctgaatgaactgg

SEQ ID NO: 42317 - RNA, 21 nt, RNAi
gaccuccugaaugaacugguu

SEQ ID NO: 42318 - RNA, 21 nt, RNAi
uucuggaggacuuacuugacc

SEQ ID NO: 42319 - DNA, 21 bp, homo sapiens
aatgaactggacacacaggat

SEQ ID NO: 42320 - RNA, 21 nt, RNAi
ugaacuggacacacaggauuu

SEQ ID NO: 42321 - RNA, 21 nt, RNAi
uuacuugaccuguguguccua

SEQ ID NO: 42322 - DNA, 21 bp, homo sapiens
aactggacacacaggatgagg

SEQ ID NO: 42323 - RNA, 21 nt, RNAi
cuggacacacaggaugagguu

SEQ ID NO: 42324 - RNA, 21 nt, RNAi
uugaccuguguguccuacucc

SEQ ID NO: 42325 - DNA, 21 bp, homo sapiens
aacctgaggctggtgaggagc

SEQ ID NO: 42326 - RNA, 21 nt, RNAi
ccugaggcuggugaggagcuu

SEQ ID NO: 42327 - RNA, 21 nt, RNAi
uuggacuccgaccacuccucg

SEQ ID NO: 42328 - DNA, 21 bp, homo sapiens
aacagactgtttgaaatggcc

SEQ ID NO: 42329 - RNA, 21 nt, RNAi
cagacuguuugaaauggccuu

SEQ ID NO: 42330 - RNA, 21 nt, RNAi
uugucugacaaacuuuaccgg

SEQ ID NO: 42331 - DNA, 21 bp, homo sapiens
aaatggccagccgccagagca

SEQ ID NO: 42332 - RNA, 21 nt, RNAi
auggccagccgccagagcauu

SEQ ID NO: 42333 - RNA, 21 nt, RNAi
uuuaccggucggcggucucgu

SEQ ID NO: 42334 - DNA, 21 bp, homo sapiens
aacagaaagcgtctctacaaa

SEQ ID NO: 42335 - RNA, 21 nt, RNAi
cagaaagcgucucuacaaauu

SEQ ID NO: 42336 - RNA, 21 nt, RNAi
uugucuuucgcagagauguuu

SEQ ID NO: 42337 - DNA, 21 bp, homo sapiens
aaagcgtctctacaaagtgat

SEQ ID NO: 42338 - RNA, 21 nt, RNAi
agcgucucuacaaagugauuu

SEQ ID NO: 42339 - RNA, 21 nt, RNAi
uuucgcagagauguuucacua

SEQ ID NO: 42340 - DNA, 21 bp, homo sapiens
aagcgtctctacaaagtgatc

SEQ ID NO: 42341 - RNA, 21 nt, RNAi
gcgucucuacaaagugaucuu

SEQ ID NO: 42342 - RNA, 21 nt, RNAi
uucgcagagauguuucacuag

SEQ ID NO: 42343 - DNA, 21 bp, homo sapiens
aaagtgatccggaagctgcag

SEQ ID NO: 42344 - RNA, 21 nt, RNAi
agugauccggaagcugcaguu

SEQ ID NO: 42345 - RNA, 21 nt, RNAi
uuucacuaggccuucgacguc

SEQ ID NO: 42346 - DNA, 21 bp, homo sapiens
aagtgatccggaagctgcagg

SEQ ID NO: 42347 - RNA, 21 nt, RNAi
gugauccggaagcugcagguu

SEQ ID NO: 42348 - RNA, 21 nt, RNAi
uucacuaggccuucgacgucc

SEQ ID NO: 42349 - DNA, 21 bp, homo sapiens
aagctgcaggacctggcagga

SEQ ID NO: 42350 - RNA, 21 nt, RNAi
gcugcaggaccuggcaggauu

SEQ ID NO: 42351 - RNA, 21 nt, RNAi
uucgacguccuggaccguccu

SEQ ID NO: 42352 - DNA, 21 bp, homo sapiens
aagaagacgaagaagcagaag

SEQ ID NO: 42353 - RNA, 21 nt, RNAi
gaagacgaagaagcagaaguu

SEQ ID NO: 42354 - RNA, 21 nt, RNAi
uucuucugcuucuucgucuuc

SEQ ID NO: 42355 - DNA, 21 bp, homo sapiens
aagacgaagaagcagaagcgt

SEQ ID NO: 42356 - RNA, 21 nt, RNAi
gacgaagaagcagaagcguuu

SEQ ID NO: 42357 - RNA, 21 nt, RNAi
uucugcuucuucgucuucgca

SEQ ID NO: 42358 - DNA, 21 bp, homo sapiens
aagaagcagaagcgtctgctc

SEQ ID NO: 42359 - RNA, 21 nt, RNAi
gaagcagaagcgucugcucuu

SEQ ID NO: 42360 - RNA, 21 nt, RNAi
uucuucgucuucgcagacgag

SEQ ID NO: 42361 - DNA, 21 bp, homo sapiens
aagcagaagcgtctgctcagg

SEQ ID NO: 42362 - RNA, 21 nt, RNAi
gcagaagcgucugcucagguu

SEQ ID NO: 42363 - RNA, 21 nt, RNAi
uucgucuucgcagacgagucc

SEQ ID NO: 42364 - DNA, 21 bp, homo sapiens
aagcgtctgctcaggttgcag

SEQ ID NO: 42365 - RNA, 21 nt, RNAi
gcgucugcucagguugcaguu

SEQ ID NO: 42366 - RNA, 21 nt, RNAi
uucgcagacgaguccaacguc

SEQ ID NO: 42367 - DNA, 21 bp, homo sapiens
aatgtccaggagccggagaag

SEQ ID NO: 42368 - RNA, 21 nt, RNAi
uguccaggagccggagaaguu

SEQ ID NO: 42369 - RNA, 21 nt, RNAi
uuacagguccucggccucuuc

SEQ ID NO: 42370 - DNA, 21 bp, homo sapiens
aaggtcaaactccgaagactg

SEQ ID NO: 42371 - RNA, 21 nt, RNAi
ggucaaacuccgaagacuguu

SEQ ID NO: 42372 - RNA, 21 nt, RNAi
uuccaguuugaggcuucugac

SEQ ID NO: 42373 - DNA, 21 bp, homo sapiens
aaactccgaagactgaaactc

SEQ ID NO: 42374 - RNA, 21 nt, RNAi
acuccgaagacugaaacucuu

SEQ ID NO: 42375 - RNA, 21 nt, RNAi
uuugaggcuucugacuuugag

SEQ ID NO: 42376 - DNA, 21 bp, homo sapiens
aactccgaagactgaaactct

SEQ ID NO: 42377 - RNA, 21 nt, RNAi
cuccgaagacugaaacucuuu

SEQ ID NO: 42378 - RNA, 21 nt, RNAi
uugaggcuucugacuuugaga

SEQ ID NO: 42379 - DNA, 21 bp, homo sapiens
aagactgaaactctgcctgca

SEQ ID NO: 42380 - RNA, 21 nt, RNAi
gacugaaacucugccugcauu

SEQ ID NO: 42381 - RNA, 21 nt, RNAi
uucugacuuugagacggacgu

SEQ ID NO: 42382 - DNA, 21 bp, homo sapiens
aaactctgcctgcagcaggac

SEQ ID NO: 42383 - RNA, 21 nt, RNAi
acucugccugcagcaggacuu

SEQ ID NO: 42384 - RNA, 21 nt, RNAi
uuugagacggacgucguccug

SEQ ID NO: 42385 - DNA, 21 bp, homo sapiens
aactctgcctgcagcaggact

SEQ ID NO: 42386 - RNA, 21 nt, RNAi
cucugccugcagcaggacuuu

SEQ ID NO: 42387 - RNA, 21 nt, RNAi
uugagacggacgucguccuga

SEQ ID NO: 42388 - DNA, 21 bp, homo sapiens
aaatcttgcaagacatttctc

SEQ ID NO: 42389 - RNA, 21 nt, RNAi
aucuugcaagacauuucucuu

SEQ ID NO: 42390 - RNA, 21 nt, RNAi
uuuagaacguucuguaaagag

SEQ ID NO: 42391 - DNA, 21 bp, homo sapiens
aatcttgcaagacatttctcc

SEQ ID NO: 42392 - RNA, 21 nt, RNAi
ucuugcaagacauuucuccuu

SEQ ID NO: 42393 - RNA, 21 nt, RNAi
uuagaacguucuguaaagagg

SEQ ID NO: 42394 - DNA, 21 bp, homo sapiens
aagacatttctcctttcacag

SEQ ID NO: 42395 - RNA, 21 nt, RNAi
gacauuucuccuuucacaguu

SEQ ID NO: 42396 - RNA, 21 nt, RNAi
uucuguaaagaggaaaguguc

SEQ ID NO: 42397 - DNA, 21 bp, homo sapiens
aattcagctccagtaaggcct

SEQ ID NO: 42398 - RNA, 21 nt, RNAi
uucagcuccaguaaggccuuu

SEQ ID NO: 42399 - RNA, 21 nt, RNAi
uuaagucgaggucauuccgga

SEQ ID NO: 42400 - DNA, 21 bp, homo sapiens
aagacctggcttccgcgagag

SEQ ID NO: 42401 - RNA, 21 nt, RNAi
gaccuggcuuccgcgagaguu

SEQ ID NO: 42402 - RNA, 21 nt, RNAi
uucuggaccgaaggcgcucuc

SEQ ID NO: 42403 - DNA, 21 bp, homo sapiens
aaggacctctaggctgtggct

SEQ ID NO: 42404 - RNA, 21 nt, RNAi
ggaccucuaggcuguggcuuu

SEQ ID NO: 42405 - RNA, 21 nt, RNAi
uuccuggagauccgacaccga

SEQ ID NO: 42406 - DNA, 21 bp, homo sapiens
aaagacaagcgtggccaggca

SEQ ID NO: 42407 - RNA, 21 nt, RNAi
agacaagcguggccaggcauu

SEQ ID NO: 42408 - RNA, 21 nt, RNAi
uuucuguucgcaccgguccgu

SEQ ID NO: 42409 - DNA, 21 bp, homo sapiens
aagacaagcgtggccaggcac

SEQ ID NO: 42410 - RNA, 21 nt, RNAi
gacaagcguggccaggcacuu

SEQ ID NO: 42411 - RNA, 21 nt, RNAi
uucuguucgcaccgguccgug

SEQ ID NO: 42412 - DNA, 21 bp, homo sapiens
aaattagccaggcgtggtggc

SEQ ID NO: 42413 - RNA, 21 nt, RNAi
auuagccaggcgugguggcuu

SEQ ID NO: 42414 - RNA, 21 nt, RNAi
uuuaaucgguccgcaccaccg

SEQ ID NO: 42415 - DNA, 21 bp, homo sapiens
aattagccaggcgtggtggca

SEQ ID NO: 42416 - RNA, 21 nt, RNAi
uuagccaggcgugguggcauu

SEQ ID NO: 42417 - RNA, 21 nt, RNAi
uuaaucgguccgcaccaccgu

SEQ ID NO: 42418 - DNA, 21 bp, homo sapiens
aagatcacgccattgcactcc

SEQ ID NO: 42419 - RNA, 21 nt, RNAi
gaucacgccauugcacuccuu

SEQ ID NO: 42420 - RNA, 21 nt, RNAi
uucuagugcgguaacgugagg

SEQ ID NO: 42421 - DNA, 21 bp, homo sapiens
catggtttcgcgcgtgcagct

SEQ ID NO: 42422 - RNA, 21 nt, RNAi
ugguuucgcgcgugcagcuuu

SEQ ID NO: 42423 - RNA, 21 nt, RNAi
uuaccaaagcgcgcacgucga

SEQ ID NO: 42424 - DNA, 21 bp, homo sapiens
cacgacgagctgctgaaggtg

SEQ ID NO: 42425 - RNA, 21 nt, RNAi
cgacgagcugcugaagguguu

SEQ ID NO: 42426 - RNA, 21 nt, RNAi
uugcugcucgacgacuuccac

SEQ ID NO: 42427 - DNA, 21 bp, homo sapiens
catgtggatgcaggacaagcc

SEQ ID NO: 42428 - RNA, 21 nt, RNAi
uguggaugcaggacaagccuu

SEQ ID NO: 42429 - RNA, 21 nt, RNAi
uuacaccuacguccuguucgg

SEQ ID NO: 42430 - DNA, 21 bp, homo sapiens
caggacaagccactcctccag

SEQ ID NO: 42431 - RNA, 21 nt, RNAi
ggacaagccacuccuccaguu

SEQ ID NO: 42432 - RNA, 21 nt, RNAi
uuccuguucggugaggagguc

SEQ ID NO: 42433 - DNA, 21 bp, homo sapiens
caagccactcctccaggaaga

SEQ ID NO: 42434 - RNA, 21 nt, RNAi
agccacuccuccaggaagauu

SEQ ID NO: 42435 - RNA, 21 nt, RNAi
uuucggugaggagguccuucu

SEQ ID NO: 42436 - DNA, 21 bp, homo sapiens
cactcctccaggaagaattag

SEQ ID NO: 42437 - RNA, 21 nt, RNAi
cuccuccaggaagaauuaguu

SEQ ID NO: 42438 - RNA, 21 nt, RNAi
uugaggagguccuucuuaauc

SEQ ID NO: 42439 - DNA, 21 bp, homo sapiens
caggaagaattaggaaggact

SEQ ID NO: 42440 - RNA, 21 nt, RNAi
ggaagaauuaggaaggacuuu

SEQ ID NO: 42441 - RNA, 21 nt, RNAi
uuccuucuuaauccuuccuga

SEQ ID NO: 42442 - DNA, 21 bp, homo sapiens
cagcacctgttccttcaggcc

SEQ ID NO: 42443 - RNA, 21 nt, RNAi
gcaccuguuccuucaggccuu

SEQ ID NO: 42444 - RNA, 21 nt, RNAi
uucguggacaaggaaguccgg

SEQ ID NO: 42445 - DNA, 21 bp, homo sapiens
cacctgttccttcaggccttc

SEQ ID NO: 42446 - RNA, 21 nt, RNAi
ccuguuccuucaggccuucuu

SEQ ID NO: 42447 - RNA, 21 nt, RNAi
uuggacaaggaaguccggaag

SEQ ID NO: 42448 - DNA, 21 bp, homo sapiens
caggccttctggcagaccatg

SEQ ID NO: 42449 - RNA, 21 nt, RNAi
ggccuucuggcagaccauguu

SEQ ID NO: 42450 - RNA, 21 nt, RNAi
uuccggaagaccgucugguac

SEQ ID NO: 42451 - DNA, 21 bp, homo sapiens
cagaccatgaatcgcgagtgg

SEQ ID NO: 42452 - RNA, 21 nt, RNAi
gaccaugaaucgcgagugguu

SEQ ID NO: 42453 - RNA, 21 nt, RNAi
uucugguacuuagcgcucacc

SEQ ID NO: 42454 - DNA, 21 bp, homo sapiens
cattgacaggctgcgcctgga

SEQ ID NO: 42455 - RNA, 21 nt, RNAi
uugacaggcugcgccuggauu

SEQ ID NO: 42456 - RNA, 21 nt, RNAi
uuaacuguccgacgcggaccu

SEQ ID NO: 42457 - DNA, 21 bp, homo sapiens
caggctgcgcctggataaatt

SEQ ID NO: 42458 - RNA, 21 nt, RNAi
ggcugcgccuggauaaauuuu

SEQ ID NO: 42459 - RNA, 21 nt, RNAi
uuccgacgcggaccuauuuaa

SEQ ID NO: 42460 - DNA, 21 bp, homo sapiens
catgctcatgcggatggtcct

SEQ ID NO: 42461 - RNA, 21 nt, RNAi
ugcucaugcggaugguccuuu

SEQ ID NO: 42462 - RNA, 21 nt, RNAi
uuacgaguacgccuaccagga

SEQ ID NO: 42463 - DNA, 21 bp, homo sapiens
catgcggatggtcctgaacga

SEQ ID NO: 42464 - RNA, 21 nt, RNAi
ugcggaugguccugaacgauu

SEQ ID NO: 42465 - RNA, 21 nt, RNAi
uuacgccuaccaggacuugcu

SEQ ID NO: 42466 - DNA, 21 bp, homo sapiens
cagatcgaggagctgctagag

SEQ ID NO: 42467 - RNA, 21 nt, RNAi
gaucgaggagcugcuagaguu

SEQ ID NO: 42468 - RNA, 21 nt, RNAi
uucuagcuccucgacgaucuc

SEQ ID NO: 42469 - DNA, 21 bp, homo sapiens
caacggtgtgaagagccactt

SEQ ID NO: 42470 - RNA, 21 nt, RNAi
acggugugaagagccacuuuu

SEQ ID NO: 42471 - RNA, 21 nt, RNAi
uuugccacacuucucggugaa

SEQ ID NO: 42472 - DNA, 21 bp, homo sapiens
cacttcatcgagatcttcctg

SEQ ID NO: 42473 - RNA, 21 nt, RNAi
cuucaucgagaucuuccuguu

SEQ ID NO: 42474 - RNA, 21 nt, RNAi
uugaaguagcucuagaaggac

SEQ ID NO: 42475 - DNA, 21 bp, homo sapiens
catcgagatcttcctggagga

SEQ ID NO: 42476 - RNA, 21 nt, RNAi
ucgagaucuuccuggaggauu

SEQ ID NO: 42477 - RNA, 21 nt, RNAi
uuagcucuagaaggaccuccu

SEQ ID NO: 42478 - DNA, 21 bp, homo sapiens
cagaccagaacctgaagttca

SEQ ID NO: 42479 - RNA, 21 nt, RNAi
gaccagaaccugaaguucauu

SEQ ID NO: 42480 - RNA, 21 nt, RNAi
uucuggucuuggacuucaagu

SEQ ID NO: 42481 - DNA, 21 bp, homo sapiens
cagaacctgaagttcatcgac

SEQ ID NO: 42482 - RNA, 21 nt, RNAi
gaaccugaaguucaucgacuu

SEQ ID NO: 42483 - RNA, 21 nt, RNAi
uucuuggacuucaaguagcug

SEQ ID NO: 42484 - DNA, 21 bp, homo sapiens
caacatcactcgaggcatctt

SEQ ID NO: 42485 - RNA, 21 nt, RNAi
acaucacucgaggcaucuuuu

SEQ ID NO: 42486 - RNA, 21 nt, RNAi
uuuguagugagcuccguagaa

SEQ ID NO: 42487 - DNA, 21 bp, homo sapiens
catcactcgaggcatctttga

SEQ ID NO: 42488 - RNA, 21 nt, RNAi
ucacucgaggcaucuuugauu

SEQ ID NO: 42489 - RNA, 21 nt, RNAi
uuagugagcuccguagaaacu

SEQ ID NO: 42490 - DNA, 21 bp, homo sapiens
cactcgaggcatctttgagac

SEQ ID NO: 42491 - RNA, 21 nt, RNAi
cucgaggcaucuuugagacuu

SEQ ID NO: 42492 - RNA, 21 nt, RNAi
uugagcuccguagaaacucug

SEQ ID NO: 42493 - DNA, 21 bp, homo sapiens
catctttgagacgattgtgga

SEQ ID NO: 42494 - RNA, 21 nt, RNAi
ucuuugagacgauuguggauu

SEQ ID NO: 42495 - RNA, 21 nt, RNAi
uuagaaacucugcuaacaccu

SEQ ID NO: 42496 - DNA, 21 bp, homo sapiens
cattgaagacctcctgaatga

SEQ ID NO: 42497 - RNA, 21 nt, RNAi
uugaagaccuccugaaugauu

SEQ ID NO: 42498 - RNA, 21 nt, RNAi
uuaacuucuggaggacuuacu

SEQ ID NO: 42499 - DNA, 21 bp, homo sapiens
cacacaggatgaggaggtggc

SEQ ID NO: 42500 - RNA, 21 nt, RNAi
cacaggaugaggagguggcuu

SEQ ID NO: 42501 - RNA, 21 nt, RNAi
uuguguccuacuccuccaccg

SEQ ID NO: 42502 - DNA, 21 bp, homo sapiens
cacaggatgaggaggtggcgt

SEQ ID NO: 42503 - RNA, 21 nt, RNAi
caggaugaggagguggcguuu

SEQ ID NO: 42504 - RNA, 21 nt, RNAi
uuguccuacuccuccaccgca

SEQ ID NO: 42505 - DNA, 21 bp, homo sapiens
cagaagaggtctgagaagccg

SEQ ID NO: 42506 - RNA, 21 nt, RNAi
gaagaggucugagaagccguu

SEQ ID NO: 42507 - RNA, 21 nt, RNAi
uucuucuccagacucuucggc

SEQ ID NO: 42508 - DNA, 21 bp, homo sapiens
cagtttgactacgaggcagtt

SEQ ID NO: 42509 - RNA, 21 nt, RNAi
guuugacuacgaggcaguuuu

SEQ ID NO: 42510 - RNA, 21 nt, RNAi
uucaaacugaugcuccgucaa

SEQ ID NO: 42511 - DNA, 21 bp, homo sapiens
cagttgctaacagactgtttg

SEQ ID NO: 42512 - RNA, 21 nt, RNAi
guugcuaacagacuguuuguu

SEQ ID NO: 42513 - RNA, 21 nt, RNAi
uucaacgauugucugacaaac

SEQ ID NO: 42514 - DNA, 21 bp, homo sapiens
cagactgtttgaaatggccag

SEQ ID NO: 42515 - RNA, 21 nt, RNAi
gacuguuugaaauggccaguu

SEQ ID NO: 42516 - RNA, 21 nt, RNAi
uucugacaaacuuuaccgguc

SEQ ID NO: 42517 - DNA, 21 bp, homo sapiens
cagaacagaaagcgtctctac

SEQ ID NO: 42518 - RNA, 21 nt, RNAi
gaacagaaagcgucucuacuu

SEQ ID NO: 42519 - RNA, 21 nt, RNAi
uucuugucuuucgcagagaug

SEQ ID NO: 42520 - DNA, 21 bp, homo sapiens
cagaaagcgtctctacaaagt

SEQ ID NO: 42521 - RNA, 21 nt, RNAi
gaaagcgucucuacaaaguuu

SEQ ID NO: 42522 - RNA, 21 nt, RNAi
uucuuucgcagagauguuuca

SEQ ID NO: 42523 - DNA, 21 bp, homo sapiens
caaagtgatccggaagctgca

SEQ ID NO: 42524 - RNA, 21 nt, RNAi
aagugauccggaagcugcauu

SEQ ID NO: 42525 - RNA, 21 nt, RNAi
uuuucacuaggccuucgacgu

SEQ ID NO: 42526 - DNA, 21 bp, homo sapiens
caggacctggcaggaggcatt

SEQ ID NO: 42527 - RNA, 21 nt, RNAi
ggaccuggcaggaggcauuuu

SEQ ID NO: 42528 - RNA, 21 nt, RNAi
uuccuggaccguccuccguaa

SEQ ID NO: 42529 - DNA, 21 bp, homo sapiens
cagaagaagacgaagaagcag

SEQ ID NO: 42530 - RNA, 21 nt, RNAi
gaagaagacgaagaagcaguu

SEQ ID NO: 42531 - RNA, 21 nt, RNAi
uucuucuucugcuucuucguc

SEQ ID NO: 42532 - DNA, 21 bp, homo sapiens
cagaagcgtctgctcaggttg

SEQ ID NO: 42533 - RNA, 21 nt, RNAi
gaagcgucugcucagguuguu

SEQ ID NO: 42534 - RNA, 21 nt, RNAi
uucuucgcagacgaguccaac

SEQ ID NO: 42535 - DNA, 21 bp, homo sapiens
caggttgcagcaggagagagg

SEQ ID NO: 42536 - RNA, 21 nt, RNAi
gguugcagcaggagagagguu

SEQ ID NO: 42537 - RNA, 21 nt, RNAi
uuccaacgucguccucucucc

SEQ ID NO: 42538 - DNA, 21 bp, homo sapiens
catggagaggaagaggagcag

SEQ ID NO: 42539 - RNA, 21 nt, RNAi
uggagaggaagaggagcaguu

SEQ ID NO: 42540 - RNA, 21 nt, RNAi
uuaccucuccuucuccucguc

SEQ ID NO: 42541 - DNA, 21 bp, homo sapiens
cagagaaggaggacacctcgg

SEQ ID NO: 42542 - RNA, 21 nt, RNAi
gagaaggaggacaccucgguu

SEQ ID NO: 42543 - RNA, 21 nt, RNAi
uucucuuccuccuguggagcc

SEQ ID NO: 42544 - DNA, 21 bp, homo sapiens
caatgtccaggagccggagaa

SEQ ID NO: 42545 - RNA, 21 nt, RNAi
auguccaggagccggagaauu

SEQ ID NO: 42546 - RNA, 21 nt, RNAi
uuuacagguccucggccucuu

SEQ ID NO: 42547 - DNA, 21 bp, homo sapiens
caggagccggagaagaagaag

SEQ ID NO: 42548 - RNA, 21 nt, RNAi
ggagccggagaagaagaaguu

SEQ ID NO: 42549 - RNA, 21 nt, RNAi
uuccucggccucuucuucuuc

SEQ ID NO: 42550 - DNA, 21 bp, homo sapiens
caggaccgtggctccagaact

SEQ ID NO: 42551 - RNA, 21 nt, RNAi
ggaccguggcuccagaacuuu

SEQ ID NO: 42552 - RNA, 21 nt, RNAi
uuccuggcaccgaggucuuga

SEQ ID NO: 42553 - DNA, 21 bp, homo sapiens
cagaaggtcaaactccgaaga

SEQ ID NO: 42554 - RNA, 21 nt, RNAi
gaaggucaaacuccgaagauu

SEQ ID NO: 42555 - RNA, 21 nt, RNAi
uucuuccaguuugaggcuucu

SEQ ID NO: 42556 - DNA, 21 bp, homo sapiens
caaactccgaagactgaaact

SEQ ID NO: 42557 - RNA, 21 nt, RNAi
aacuccgaagacugaaacuuu

SEQ ID NO: 42558 - RNA, 21 nt, RNAi
uuuugaggcuucugacuuuga

SEQ ID NO: 42559 - DNA, 21 bp, homo sapiens
cagtgtggtggtttatattca

SEQ ID NO: 42560 - RNA, 21 nt, RNAi
guguggugguuuauauucauu

SEQ ID NO: 42561 - RNA, 21 nt, RNAi
uucacaccaccaaauauaagu

SEQ ID NO: 42562 - DNA, 21 bp, homo sapiens
caagacatttctcctttcaca

SEQ ID NO: 42563 - RNA, 21 nt, RNAi
agacauuucuccuuucacauu

SEQ ID NO: 42564 - RNA, 21 nt, RNAi
uuucuguaaagaggaaagugu

SEQ ID NO: 42565 - DNA, 21 bp, homo sapiens
catttctcctttcacagaact

SEQ ID NO: 42566 - RNA, 21 nt, RNAi
uuucuccuuucacagaacuuu

SEQ ID NO: 42567 - RNA, 21 nt, RNAi
uuaaagaggaaagugucuuga

SEQ ID NO: 42568 - DNA, 21 bp, homo sapiens
cagctccagtaaggcctggat

SEQ ID NO: 42569 - RNA, 21 nt, RNAi
gcuccaguaaggccuggauuu

SEQ ID NO: 42570 - RNA, 21 nt, RNAi
uucgaggucauuccggaccua

SEQ ID NO: 42571 - DNA, 21 bp, homo sapiens
cacacctgctggagcctgtga

SEQ ID NO: 42572 - RNA, 21 nt, RNAi
caccugcuggagccugugauu

SEQ ID NO: 42573 - RNA, 21 nt, RNAi
uuguggacgaccucggacacu

SEQ ID NO: 42574 - DNA, 21 bp, homo sapiens
cacagcctgcataggtgacaa

SEQ ID NO: 42575 - RNA, 21 nt, RNAi
cagccugcauaggugacaauu

SEQ ID NO: 42576 - RNA, 21 nt, RNAi
uugucggacguauccacuguu

SEQ ID NO: 42577 - DNA, 21 bp, homo sapiens
cagcctgcataggtgacaagg

SEQ ID NO: 42578 - RNA, 21 nt, RNAi
gccugcauaggugacaagguu

SEQ ID NO: 42579 - RNA, 21 nt, RNAi
uucggacguauccacuguucc

SEQ ID NO: 42580 - DNA, 21 bp, homo sapiens
caggaaggacctctaggctgt

SEQ ID NO: 42581 - RNA, 21 nt, RNAi
ggaaggaccucuaggcuguuu

SEQ ID NO: 42582 - RNA, 21 nt, RNAi
uuccuuccuggagauccgaca

SEQ ID NO: 42583 - DNA, 21 bp, homo sapiens
cacctggtgacacctccttca

SEQ ID NO: 42584 - RNA, 21 nt, RNAi
ccuggugacaccuccuucauu

SEQ ID NO: 42585 - RNA, 21 nt, RNAi
uuggaccacuguggaggaagu

SEQ ID NO: 42586 - DNA, 21 bp, homo sapiens
caggcacagtggctcacacct

SEQ ID NO: 42587 - RNA, 21 nt, RNAi
ggcacaguggcucacaccuuu

SEQ ID NO: 42588 - RNA, 21 nt, RNAi
uuccgugucaccgagugugga

SEQ ID NO: 42589 - DNA, 21 bp, homo sapiens
cacagtggctcacacctgtaa

SEQ ID NO: 42590 - RNA, 21 nt, RNAi
caguggcucacaccuguaauu

SEQ ID NO: 42591 - RNA, 21 nt, RNAi
uugucaccgaguguggacauu

SEQ ID NO: 42592 - DNA, 21 bp, homo sapiens
cagtggctcacacctgtaatc

SEQ ID NO: 42593 - RNA, 21 nt, RNAi
guggcucacaccuguaaucuu

SEQ ID NO: 42594 - RNA, 21 nt, RNAi
uucaccgaguguggacauuag

SEQ ID NO: 42595 - DNA, 21 bp, homo sapiens
cagatcacctgaggtcaggag

SEQ ID NO: 42596 - RNA, 21 nt, RNAi
gaucaccugaggucaggaguu

SEQ ID NO: 42597 - RNA, 21 nt, RNAi
uucuaguggacuccaguccuc

SEQ ID NO: 42598 - DNA, 21 bp, homo sapiens
cacctgaggtcaggagtttga

SEQ ID NO: 42599 - RNA, 21 nt, RNAi
ccugaggucaggaguuugauu

SEQ ID NO: 42600 - RNA, 21 nt, RNAi
uuggacuccaguccucaaacu

SEQ ID NO: 42601 - DNA, 21 bp, homo sapiens
caggagtttgagaccagactg

SEQ ID NO: 42602 - RNA, 21 nt, RNAi
ggaguuugagaccagacuguu

SEQ ID NO: 42603 - RNA, 21 nt, RNAi
uuccucaaacucuggucugac

SEQ ID NO: 42604 - DNA, 21 bp, homo sapiens
cagactgaccaacatggagaa

SEQ ID NO: 42605 - RNA, 21 nt, RNAi
gacugaccaacauggagaauu

SEQ ID NO: 42606 - RNA, 21 nt, RNAi
uucugacugguuguaccucuu

SEQ ID NO: 42607 - DNA, 21 bp, homo sapiens
caggagaattgcttgaacctg

SEQ ID NO: 42608 - RNA, 21 nt, RNAi
ggagaauugcuugaaccuguu

SEQ ID NO: 42609 - RNA, 21 nt, RNAi
uuccucuuaacgaacuuggac

SEQ ID NO: 42610 - DNA, 21 bp, homo sapiens
cagaggttgtggtgagctaag

SEQ ID NO: 42611 - RNA, 21 nt, RNAi
gagguuguggugagcuaaguu

SEQ ID NO: 42612 - RNA, 21 nt, RNAi
uucuccaacaccacucgauuc

SEQ ID NO: 42613 - DNA, 21 bp, homo sapiens
cacgccattgcactccagcct

SEQ ID NO: 42614 - RNA, 21 nt, RNAi
cgccauugcacuccagccuuu

SEQ ID NO: 42615 - RNA, 21 nt, RNAi
uugcgguaacgugaggucgga

SEQ ID NO: 42616 - DNA, 21 bp, homo sapiens
gaggaagctccggaaatacat

SEQ ID NO: 42617 - RNA, 21 nt, RNAi
ggaagcuccggaaauacauuu

SEQ ID NO: 42618 - RNA, 21 nt, RNAi
uuccuucgaggccuuuaugua

SEQ ID NO: 42619 - DNA, 21 bp, homo sapiens
gaagctccggaaatacatcgt

SEQ ID NO: 42620 - RNA, 21 nt, RNAi
agcuccggaaauacaucguuu

SEQ ID NO: 42621 - RNA, 21 nt, RNAi
uuucgaggccuuuauguagca

SEQ ID NO: 42622 - DNA, 21 bp, homo sapiens
gaaatacatcgtcgccaggac

SEQ ID NO: 42623 - RNA, 21 nt, RNAi
aauacaucgucgccaggacuu

SEQ ID NO: 42624 - RNA, 21 nt, RNAi
uuuuauguagcagcgguccug

SEQ ID NO: 42625 - DNA, 21 bp, homo sapiens
gacgagctgctgaaggtgtgg

SEQ ID NO: 42626 - RNA, 21 nt, RNAi
cgagcugcugaaggugugguu

SEQ ID NO: 42627 - RNA, 21 nt, RNAi
uugcucgacgacuuccacacc

SEQ ID NO: 42628 - DNA, 21 bp, homo sapiens
gagctgctgaaggtgtggaaa

SEQ ID NO: 42629 - RNA, 21 nt, RNAi
gcugcugaagguguggaaauu

SEQ ID NO: 42630 - RNA, 21 nt, RNAi
uucgacgacuuccacaccuuu

SEQ ID NO: 42631 - DNA, 21 bp, homo sapiens
gaaggtgtggaaaggactgtt

SEQ ID NO: 42632 - RNA, 21 nt, RNAi
agguguggaaaggacuguuuu

SEQ ID NO: 42633 - RNA, 21 nt, RNAi
uuuccacaccuuuccugacaa

SEQ ID NO: 42634 - DNA, 21 bp, homo sapiens
gatgcaggacaagccactcct

SEQ ID NO: 42635 - RNA, 21 nt, RNAi
ugcaggacaagccacuccuuu

SEQ ID NO: 42636 - RNA, 21 nt, RNAi
uuacguccuguucggugagga

SEQ ID NO: 42637 - DNA, 21 bp, homo sapiens
gacaagccactcctccaggaa

SEQ ID NO: 42638 - RNA, 21 nt, RNAi
caagccacuccuccaggaauu

SEQ ID NO: 42639 - RNA, 21 nt, RNAi
uuguucggugaggagguccuu

SEQ ID NO: 42640 - DNA, 21 bp, homo sapiens
gaagaattaggaaggactatt

SEQ ID NO: 42641 - RNA, 21 nt, RNAi
agaauuaggaaggacuauuuu

SEQ ID NO: 42642 - RNA, 21 nt, RNAi
uuucuuaauccuuccugauaa

SEQ ID NO: 42643 - DNA, 21 bp, homo sapiens
gaattaggaaggactatttcc

SEQ ID NO: 42644 - RNA, 21 nt, RNAi
auuaggaaggacuauuuccuu

SEQ ID NO: 42645 - RNA, 21 nt, RNAi
uuuaauccuuccugauaaagg

SEQ ID NO: 42646 - DNA, 21 bp, homo sapiens
gaggcgcagcacctgttcctt

SEQ ID NO: 42647 - RNA, 21 nt, RNAi
ggcgcagcaccuguuccuuuu

SEQ ID NO: 42648 - RNA, 21 nt, RNAi
uuccgcgucguggacaaggaa

SEQ ID NO: 42649 - DNA, 21 bp, homo sapiens
gaccatgaatcgcgagtggac

SEQ ID NO: 42650 - RNA, 21 nt, RNAi
ccaugaaucgcgaguggacuu

SEQ ID NO: 42651 - RNA, 21 nt, RNAi
uugguacuuagcgcucaccug

SEQ ID NO: 42652 - DNA, 21 bp, homo sapiens
gacaggctgcgcctggataaa

SEQ ID NO: 42653 - RNA, 21 nt, RNAi
caggcugcgccuggauaaauu

SEQ ID NO: 42654 - RNA, 21 nt, RNAi
uuguccgacgcggaccuauuu

SEQ ID NO: 42655 - DNA, 21 bp, homo sapiens
gataaattctacatgctcatg

SEQ ID NO: 42656 - RNA, 21 nt, RNAi
uaaauucuacaugcucauguu

SEQ ID NO: 42657 - RNA, 21 nt, RNAi
uuauuuaagauguacgaguac

SEQ ID NO: 42658 - DNA, 21 bp, homo sapiens
gatggtcctgaacgagtcctt

SEQ ID NO: 42659 - RNA, 21 nt, RNAi
ugguccugaacgaguccuuuu

SEQ ID NO: 42660 - RNA, 21 nt, RNAi
uuaccaggacuugcucaggaa

SEQ ID NO: 42661 - DNA, 21 bp, homo sapiens
gaacgagtccttgaaggttct

SEQ ID NO: 42662 - RNA, 21 nt, RNAi
acgaguccuugaagguucuuu

SEQ ID NO: 42663 - RNA, 21 nt, RNAi
uuugcucaggaacuuccaaga

SEQ ID NO: 42664 - DNA, 21 bp, homo sapiens
gagtccttgaaggttctgaag

SEQ ID NO: 42665 - RNA, 21 nt, RNAi
guccuugaagguucugaaguu

SEQ ID NO: 42666 - RNA, 21 nt, RNAi
uucaggaacuuccaagacuuc

SEQ ID NO: 42667 - DNA, 21 bp, homo sapiens
gaaggttctgaagatgcaagg

SEQ ID NO: 42668 - RNA, 21 nt, RNAi
agguucugaagaugcaagguu

SEQ ID NO: 42669 - RNA, 21 nt, RNAi
uuuccaagacuucuacguucc

SEQ ID NO: 42670 - DNA, 21 bp, homo sapiens
gaagaaagacagatcgaggag

SEQ ID NO: 42671 - RNA, 21 nt, RNAi
agaaagacagaucgaggaguu

SEQ ID NO: 42672 - RNA, 21 nt, RNAi
uuucuuucugucuagcuccuc

SEQ ID NO: 42673 - DNA, 21 bp, homo sapiens
gaaagacagatcgaggagctg

SEQ ID NO: 42674 - RNA, 21 nt, RNAi
aagacagaucgaggagcuguu

SEQ ID NO: 42675 - RNA, 21 nt, RNAi
uuuucugucuagcuccucgac

SEQ ID NO: 42676 - DNA, 21 bp, homo sapiens
gacagatcgaggagctgctag

SEQ ID NO: 42677 - RNA, 21 nt, RNAi
cagaucgaggagcugcuaguu

SEQ ID NO: 42678 - RNA, 21 nt, RNAi
uugucuagcuccucgacgauc

SEQ ID NO: 42679 - DNA, 21 bp, homo sapiens
gatcgaggagctgctagagct

SEQ ID NO: 42680 - RNA, 21 nt, RNAi
ucgaggagcugcuagagcuuu

SEQ ID NO: 42681 - RNA, 21 nt, RNAi
uuagcuccucgacgaucucga

SEQ ID NO: 42682 - DNA, 21 bp, homo sapiens
gaggagctgctagagctgctg

SEQ ID NO: 42683 - RNA, 21 nt, RNAi
ggagcugcuagagcugcuguu

SEQ ID NO: 42684 - RNA, 21 nt, RNAi
uuccucgacgaucucgacgac

SEQ ID NO: 42685 - DNA, 21 bp, homo sapiens
gagctgctagagctgctgatg

SEQ ID NO: 42686 - RNA, 21 nt, RNAi
gcugcuagagcugcugauguu

SEQ ID NO: 42687 - RNA, 21 nt, RNAi
uucgacgaucucgacgacuac

SEQ ID NO: 42688 - DNA, 21 bp, homo sapiens
gagctgctgatgactgagatc

SEQ ID NO: 42689 - RNA, 21 nt, RNAi
gcugcugaugacugagaucuu

SEQ ID NO: 42690 - RNA, 21 nt, RNAi
uucgacgacuacugacucuag

SEQ ID NO: 42691 - DNA, 21 bp, homo sapiens
gaagagccacttcatcgagat

SEQ ID NO: 42692 - RNA, 21 nt, RNAi
agagccacuucaucgagauuu

SEQ ID NO: 42693 - RNA, 21 nt, RNAi
uuucucggugaaguagcucua

SEQ ID NO: 42694 - DNA, 21 bp, homo sapiens
gagccacttcatcgagatctt

SEQ ID NO: 42695 - RNA, 21 nt, RNAi
gccacuucaucgagaucuuuu

SEQ ID NO: 42696 - RNA, 21 nt, RNAi
uucggugaaguagcucuagaa

SEQ ID NO: 42697 - DNA, 21 bp, homo sapiens
gagatcttcctggaggagctg

SEQ ID NO: 42698 - RNA, 21 nt, RNAi
gaucuuccuggaggagcuguu

SEQ ID NO: 42699 - RNA, 21 nt, RNAi
uucuagaaggaccuccucgac

SEQ ID NO: 42700 - DNA, 21 bp, homo sapiens
gatcttcctggaggagctgac

SEQ ID NO: 42701 - RNA, 21 nt, RNAi
ucuuccuggaggagcugacuu

SEQ ID NO: 42702 - RNA, 21 nt, RNAi
uuagaaggaccuccucgacug

SEQ ID NO: 42703 - DNA, 21 bp, homo sapiens
gaggagcttacggcagaccag

SEQ ID NO: 42704 - RNA, 21 nt, RNAi
ggagcuuacggcagaccaguu

SEQ ID NO: 42705 - RNA, 21 nt, RNAi
uuccucgaaugccgucugguc

SEQ ID NO: 42706 - DNA, 21 bp, homo sapiens
gagcttacggcagaccagaac

SEQ ID NO: 42707 - RNA, 21 nt, RNAi
gcuuacggcagaccagaacuu

SEQ ID NO: 42708 - RNA, 21 nt, RNAi
uucgaaugccgucuggucuug

SEQ ID NO: 42709 - DNA, 21 bp, homo sapiens
gaccagaacctgaagttcatc

SEQ ID NO: 42710 - RNA, 21 nt, RNAi
ccagaaccugaaguucaucuu

SEQ ID NO: 42711 - RNA, 21 nt, RNAi
uuggucuuggacuucaaguag

SEQ ID NO: 42712 - DNA, 21 bp, homo sapiens
gaacaacatcactcgaggcat

SEQ ID NO: 42713 - RNA, 21 nt, RNAi
acaacaucacucgaggcauuu

SEQ ID NO: 42714 - RNA, 21 nt, RNAi
uuuguuguagugagcuccgua

SEQ ID NO: 42715 - DNA, 21 bp, homo sapiens
gaggcatctttgagacgattg

SEQ ID NO: 42716 - RNA, 21 nt, RNAi
ggcaucuuugagacgauuguu

SEQ ID NO: 42717 - RNA, 21 nt, RNAi
uuccguagaaacucugcuaac

SEQ ID NO: 42718 - DNA, 21 bp, homo sapiens
gagacgattgtggagcaggcc

SEQ ID NO: 42719 - RNA, 21 nt, RNAi
gacgauuguggagcaggccuu

SEQ ID NO: 42720 - RNA, 21 nt, RNAi
uucugcuaacaccucguccgg

SEQ ID NO: 42721 - DNA, 21 bp, homo sapiens
gaagacctcctgaatgaactg

SEQ ID NO: 42722 - RNA, 21 nt, RNAi
agaccuccugaaugaacuguu

SEQ ID NO: 42723 - RNA, 21 nt, RNAi
uuucuggaggacuuacuugac

SEQ ID NO: 42724 - DNA, 21 bp, homo sapiens
gacctcctgaatgaactggac

SEQ ID NO: 42725 - RNA, 21 nt, RNAi
ccuccugaaugaacuggacuu

SEQ ID NO: 42726 - RNA, 21 nt, RNAi
uuggaggacuuacuugaccug

SEQ ID NO: 42727 - DNA, 21 bp, homo sapiens
gaatgaactggacacacagga

SEQ ID NO: 42728 - RNA, 21 nt, RNAi
augaacuggacacacaggauu

SEQ ID NO: 42729 - RNA, 21 nt, RNAi
uuuacuugaccuguguguccu

SEQ ID NO: 42730 - DNA, 21 bp, homo sapiens
gaactggacacacaggatgag

SEQ ID NO: 42731 - RNA, 21 nt, RNAi
acuggacacacaggaugaguu

SEQ ID NO: 42732 - RNA, 21 nt, RNAi
uuugaccuguguguccuacuc

SEQ ID NO: 42733 - DNA, 21 bp, homo sapiens
gacacacaggatgaggaggtg

SEQ ID NO: 42734 - RNA, 21 nt, RNAi
cacacaggaugaggagguguu

SEQ ID NO: 42735 - RNA, 21 nt, RNAi
uuguguguccuacuccuccac

SEQ ID NO: 42736 - DNA, 21 bp, homo sapiens
gaggtggcgtcggacagtgat

SEQ ID NO: 42737 - RNA, 21 nt, RNAi
gguggcgucggacagugauuu

SEQ ID NO: 42738 - RNA, 21 nt, RNAi
uuccaccgcagccugucacua

SEQ ID NO: 42739 - DNA, 21 bp, homo sapiens
gacagtgatgagtcctctgag

SEQ ID NO: 42740 - RNA, 21 nt, RNAi
cagugaugaguccucugaguu

SEQ ID NO: 42741 - RNA, 21 nt, RNAi
uugucacuacucaggagacuc

SEQ ID NO: 42742 - DNA, 21 bp, homo sapiens
gaagaggtctgagaagccgcc

SEQ ID NO: 42743 - RNA, 21 nt, RNAi
agaggucugagaagccgccuu

SEQ ID NO: 42744 - RNA, 21 nt, RNAi
uuucuccagacucuucggcgg

SEQ ID NO: 42745 - DNA, 21 bp, homo sapiens
gaacctgaggctggtgaggag

SEQ ID NO: 42746 - RNA, 21 nt, RNAi
accugaggcuggugaggaguu

SEQ ID NO: 42747 - RNA, 21 nt, RNAi
uuuggacuccgaccacuccuc

SEQ ID NO: 42748 - DNA, 21 bp, homo sapiens
gactacgaggcagttgctaac

SEQ ID NO: 42749 - RNA, 21 nt, RNAi
cuacgaggcaguugcuaacuu

SEQ ID NO: 42750 - RNA, 21 nt, RNAi
uugaugcuccgucaacgauug

SEQ ID NO: 42751 - DNA, 21 bp, homo sapiens
gaggcagttgctaacagactg

SEQ ID NO: 42752 - RNA, 21 nt, RNAi
ggcaguugcuaacagacuguu

SEQ ID NO: 42753 - RNA, 21 nt, RNAi
uuccgucaacgauugucugac

SEQ ID NO: 42754 - DNA, 21 bp, homo sapiens
gactgtttgaaatggccagcc

SEQ ID NO: 42755 - RNA, 21 nt, RNAi
cuguuugaaauggccagccuu

SEQ ID NO: 42756 - RNA, 21 nt, RNAi
uugacaaacuuuaccggucgg

SEQ ID NO: 42757 - DNA, 21 bp, homo sapiens
gaacagaaagcgtctctacaa

SEQ ID NO: 42758 - RNA, 21 nt, RNAi
acagaaagcgucucuacaauu

SEQ ID NO: 42759 - RNA, 21 nt, RNAi
uuugucuuucgcagagauguu

SEQ ID NO: 42760 - DNA, 21 bp, homo sapiens
gaaagcgtctctacaaagtga

SEQ ID NO: 42761 - RNA, 21 nt, RNAi
aagcgucucuacaaagugauu

SEQ ID NO: 42762 - RNA, 21 nt, RNAi
uuuucgcagagauguuucacu

SEQ ID NO: 42763 - DNA, 21 bp, homo sapiens
gatccggaagctgcaggacct

SEQ ID NO: 42764 - RNA, 21 nt, RNAi
uccggaagcugcaggaccuuu

SEQ ID NO: 42765 - RNA, 21 nt, RNAi
uuaggccuucgacguccugga

SEQ ID NO: 42766 - DNA, 21 bp, homo sapiens
gaggcggcagaagaagacgaa

SEQ ID NO: 42767 - RNA, 21 nt, RNAi
ggcggcagaagaagacgaauu

SEQ ID NO: 42768 - RNA, 21 nt, RNAi
uuccgccgucuucuucugcuu

SEQ ID NO: 42769 - DNA, 21 bp, homo sapiens
gaagaagacgaagaagcagaa

SEQ ID NO: 42770 - RNA, 21 nt, RNAi
agaagacgaagaagcagaauu

SEQ ID NO: 42771 - RNA, 21 nt, RNAi
uuucuucugcuucuucgucuu

SEQ ID NO: 42772 - DNA, 21 bp, homo sapiens
gaagacgaagaagcagaagcg

SEQ ID NO: 42773 - RNA, 21 nt, RNAi
agacgaagaagcagaagcguu

SEQ ID NO: 42774 - RNA, 21 nt, RNAi
uuucugcuucuucgucuucgc

SEQ ID NO: 42775 - DNA, 21 bp, homo sapiens
gacgaagaagcagaagcgtct

SEQ ID NO: 42776 - RNA, 21 nt, RNAi
cgaagaagcagaagcgucuuu

SEQ ID NO: 42777 - RNA, 21 nt, RNAi
uugcuucuucgucuucgcaga

SEQ ID NO: 42778 - DNA, 21 bp, homo sapiens
gaagaagcagaagcgtctgct

SEQ ID NO: 42779 - RNA, 21 nt, RNAi
agaagcagaagcgucugcuuu

SEQ ID NO: 42780 - RNA, 21 nt, RNAi
uuucuucgucuucgcagacga

SEQ ID NO: 42781 - DNA, 21 bp, homo sapiens
gaagcagaagcgtctgctcag

SEQ ID NO: 42782 - RNA, 21 nt, RNAi
agcagaagcgucugcucaguu

SEQ ID NO: 42783 - RNA, 21 nt, RNAi
uuucgucuucgcagacgaguc

SEQ ID NO: 42784 - DNA, 21 bp, homo sapiens
gaagcgtctgctcaggttgca

SEQ ID NO: 42785 - RNA, 21 nt, RNAi
agcgucugcucagguugcauu

SEQ ID NO: 42786 - RNA, 21 nt, RNAi
uuucgcagacgaguccaacgu

SEQ ID NO: 42787 - DNA, 21 bp, homo sapiens
gagaggaagaggagcaggagg

SEQ ID NO: 42788 - RNA, 21 nt, RNAi
gaggaagaggagcaggagguu

SEQ ID NO: 42789 - RNA, 21 nt, RNAi
uucuccuucuccucguccucc

SEQ ID NO: 42790 - DNA, 21 bp, homo sapiens
gaggaagaggagcaggaggag

SEQ ID NO: 42791 - RNA, 21 nt, RNAi
ggaagaggagcaggaggaguu

SEQ ID NO: 42792 - RNA, 21 nt, RNAi
uuccuucuccucguccuccuc

SEQ ID NO: 42793 - DNA, 21 bp, homo sapiens
gagccggagaagaagaagaaa

SEQ ID NO: 42794 - RNA, 21 nt, RNAi
gccggagaagaagaagaaauu

SEQ ID NO: 42795 - RNA, 21 nt, RNAi
uucggccucuucuucuucuuu

SEQ ID NO: 42796 - DNA, 21 bp, homo sapiens
gagaagaagaagaaacgcagg

SEQ ID NO: 42797 - RNA, 21 nt, RNAi
gaagaagaagaaacgcagguu

SEQ ID NO: 42798 - RNA, 21 nt, RNAi
uucuucuucuucuuugcgucc

SEQ ID NO: 42799 - DNA, 21 bp, homo sapiens
gaccgtggctccagaactcct

SEQ ID NO: 42800 - RNA, 21 nt, RNAi
ccguggcuccagaacuccuuu

SEQ ID NO: 42801 - RNA, 21 nt, RNAi
uuggcaccgaggucuugagga

SEQ ID NO: 42802 - DNA, 21 bp, homo sapiens
gaaggtcaaactccgaagact

SEQ ID NO: 42803 - RNA, 21 nt, RNAi
aggucaaacuccgaagacuuu

SEQ ID NO: 42804 - RNA, 21 nt, RNAi
uuuccaguuugaggcuucuga

SEQ ID NO: 42805 - DNA, 21 bp, homo sapiens
gaagactgaaactctgcctgc

SEQ ID NO: 42806 - RNA, 21 nt, RNAi
agacugaaacucugccugcuu

SEQ ID NO: 42807 - RNA, 21 nt, RNAi
uuucugacuuugagacggacg

SEQ ID NO: 42808 - DNA, 21 bp, homo sapiens
gactgaaactctgcctgcagc

SEQ ID NO: 42809 - RNA, 21 nt, RNAi
cugaaacucugccugcagcuu

SEQ ID NO: 42810 - RNA, 21 nt, RNAi
uugacuuugagacggacgucg

SEQ ID NO: 42811 - DNA, 21 bp, homo sapiens
gaaactctgcctgcagcagga

SEQ ID NO: 42812 - RNA, 21 nt, RNAi
aacucugccugcagcaggauu

SEQ ID NO: 42813 - RNA, 21 nt, RNAi
uuuugagacggacgucguccu

SEQ ID NO: 42814 - DNA, 21 bp, homo sapiens
gagcagtgtggtggtttatat

SEQ ID NO: 42815 - RNA, 21 nt, RNAi
gcaguguggugguuuauauuu

SEQ ID NO: 42816 - RNA, 21 nt, RNAi
uucgucacaccaccaaauaua

SEQ ID NO: 42817 - DNA, 21 bp, homo sapiens
gacatttctcctttcacagaa

SEQ ID NO: 42818 - RNA, 21 nt, RNAi
cauuucuccuuucacagaauu

SEQ ID NO: 42819 - RNA, 21 nt, RNAi
uuguaaagaggaaagugucuu

SEQ ID NO: 42820 - DNA, 21 bp, homo sapiens
gaattcagctccagtaaggcc

SEQ ID NO: 42821 - RNA, 21 nt, RNAi
auucagcuccaguaaggccuu

SEQ ID NO: 42822 - RNA, 21 nt, RNAi
uuuaagucgaggucauuccgg

SEQ ID NO: 42823 - DNA, 21 bp, homo sapiens
gaagacctggcttccgcgaga

SEQ ID NO: 42824 - RNA, 21 nt, RNAi
agaccuggcuuccgcgagauu

SEQ ID NO: 42825 - RNA, 21 nt, RNAi
uuucuggaccgaaggcgcucu

SEQ ID NO: 42826 - DNA, 21 bp, homo sapiens
gagagccttgttcctggaggc

SEQ ID NO: 42827 - RNA, 21 nt, RNAi
gagccuuguuccuggaggcuu

SEQ ID NO: 42828 - RNA, 21 nt, RNAi
uucucggaacaaggaccuccg

SEQ ID NO: 42829 - DNA, 21 bp, homo sapiens
gagccttgttcctggaggcag

SEQ ID NO: 42830 - RNA, 21 nt, RNAi
gccuuguuccuggaggcaguu

SEQ ID NO: 42831 - RNA, 21 nt, RNAi
uucggaacaaggaccuccguc

SEQ ID NO: 42832 - DNA, 21 bp, homo sapiens
gacggagagctgacagtagcc

SEQ ID NO: 42833 - RNA, 21 nt, RNAi
cggagagcugacaguagccuu

SEQ ID NO: 42834 - RNA, 21 nt, RNAi
uugccucucgacugucaucgg

SEQ ID NO: 42835 - DNA, 21 bp, homo sapiens
gaccaggaaggacctctaggc

SEQ ID NO: 42836 - RNA, 21 nt, RNAi
ccaggaaggaccucuaggcuu

SEQ ID NO: 42837 - RNA, 21 nt, RNAi
uugguccuuccuggagauccg

SEQ ID NO: 42838 - DNA, 21 bp, homo sapiens
gaaggacctctaggctgtggc

SEQ ID NO: 42839 - RNA, 21 nt, RNAi
aggaccucuaggcuguggcuu

SEQ ID NO: 42840 - RNA, 21 nt, RNAi
uuuccuggagauccgacaccg

SEQ ID NO: 42841 - DNA, 21 bp, homo sapiens
gaggtggccagatcacctgag

SEQ ID NO: 42842 - RNA, 21 nt, RNAi
gguggccagaucaccugaguu

SEQ ID NO: 42843 - RNA, 21 nt, RNAi
uuccaccggucuaguggacuc

SEQ ID NO: 42844 - DNA, 21 bp, homo sapiens
gatcacctgaggtcaggagtt

SEQ ID NO: 42845 - RNA, 21 nt, RNAi
ucaccugaggucaggaguuuu

SEQ ID NO: 42846 - RNA, 21 nt, RNAi
uuaguggacuccaguccucaa

SEQ ID NO: 42847 - DNA, 21 bp, homo sapiens
gaggtcaggagtttgagacca

SEQ ID NO: 42848 - RNA, 21 nt, RNAi
ggucaggaguuugagaccauu

SEQ ID NO: 42849 - RNA, 21 nt, RNAi
uuccaguccucaaacucuggu

SEQ ID NO: 42850 - DNA, 21 bp, homo sapiens
gagtttgagaccagactgacc

SEQ ID NO: 42851 - RNA, 21 nt, RNAi
guuugagaccagacugaccuu

SEQ ID NO: 42852 - RNA, 21 nt, RNAi
uucaaacucuggucugacugg

SEQ ID NO: 42853 - DNA, 21 bp, homo sapiens
gagaccagactgaccaacatg

SEQ ID NO: 42854 - RNA, 21 nt, RNAi
gaccagacugaccaacauguu

SEQ ID NO: 42855 - RNA, 21 nt, RNAi
uucuggucugacugguuguac

SEQ ID NO: 42856 - DNA, 21 bp, homo sapiens
gaccagactgaccaacatgga

SEQ ID NO: 42857 - RNA, 21 nt, RNAi
ccagacugaccaacauggauu

SEQ ID NO: 42858 - RNA, 21 nt, RNAi
uuggucugacugguuguaccu

SEQ ID NO: 42859 - DNA, 21 bp, homo sapiens
gactgaccaacatggagaaac

SEQ ID NO: 42860 - RNA, 21 nt, RNAi
cugaccaacauggagaaacuu

SEQ ID NO: 42861 - RNA, 21 nt, RNAi
uugacugguuguaccucuuug

SEQ ID NO: 42862 - DNA, 21 bp, homo sapiens
gaggctgaggcaggagaattg

SEQ ID NO: 42863 - RNA, 21 nt, RNAi
ggcugaggcaggagaauuguu

SEQ ID NO: 42864 - RNA, 21 nt, RNAi
uuccgacuccguccucuuaac

SEQ ID NO: 42865 - DNA, 21 bp, homo sapiens
gaggcaggagaattgcttgaa

SEQ ID NO: 42866 - RNA, 21 nt, RNAi
ggcaggagaauugcuugaauu

SEQ ID NO: 42867 - RNA, 21 nt, RNAi
uuccguccucuuaacgaacuu

SEQ ID NO: 42868 - DNA, 21 bp, homo sapiens
gaggcagaggttgtggtgagc

SEQ ID NO: 42869 - RNA, 21 nt, RNAi
ggcagagguuguggugagcuu

SEQ ID NO: 42870 - RNA, 21 nt, RNAi
uuccgucuccaacaccacucg

SEQ ID NO: 42871 - DNA, 21 bp, homo sapiens
gaggttgtggtgagctaagat

SEQ ID NO: 42872 - RNA, 21 nt, RNAi
gguuguggugagcuaagauuu

SEQ ID NO: 42873 - RNA, 21 nt, RNAi
uuccaacaccacucgauucua

SEQ ID NO: 42874 - DNA, 21 bp, homo sapiens
gagctaagatcacgccattgc

SEQ ID NO: 42875 - RNA, 21 nt, RNAi
gcuaagaucacgccauugcuu

SEQ ID NO: 42876 - RNA, 21 nt, RNAi
uucgauucuagugcgguaacg

SEQ ID NO: 42877 - DNA, 21 bp, homo sapiens
gatcacgccattgcactccag

SEQ ID NO: 42878 - RNA, 21 nt, RNAi
ucacgccauugcacuccaguu

SEQ ID NO: 42879 - RNA, 21 nt, RNAi
uuagugcgguaacgugagguc

SEQ ID NO: 42880 - DNA, 21 bp, homo sapiens
tacatcgtcgccaggactcag

SEQ ID NO: 42881 - RNA, 21 nt, RNAi
caucgucgccaggacucaguu

SEQ ID NO: 42882 - RNA, 21 nt, RNAi
uuguagcagcgguccugaguc

SEQ ID NO: 42883 - DNA, 21 bp, homo sapiens
tacgcacgacgagctgctgaa

SEQ ID NO: 42884 - RNA, 21 nt, RNAi
cgcacgacgagcugcugaauu

SEQ ID NO: 42885 - RNA, 21 nt, RNAi
uugcgugcugcucgacgacuu

SEQ ID NO: 42886 - DNA, 21 bp, homo sapiens
tattgcatgtggatgcaggac

SEQ ID NO: 42887 - RNA, 21 nt, RNAi
uugcauguggaugcaggacuu

SEQ ID NO: 42888 - RNA, 21 nt, RNAi
uuaacguacaccuacguccug

SEQ ID NO: 42889 - DNA, 21 bp, homo sapiens
taaattctacatgctcatgcg

SEQ ID NO: 42890 - RNA, 21 nt, RNAi
aauucuacaugcucaugcguu

SEQ ID NO: 42891 - RNA, 21 nt, RNAi
uuuuaagauguacgaguacgc

SEQ ID NO: 42892 - DNA, 21 bp, homo sapiens
tacatgctcatgcggatggtc

SEQ ID NO: 42893 - RNA, 21 nt, RNAi
caugcucaugcggauggucuu

SEQ ID NO: 42894 - RNA, 21 nt, RNAi
uuguacgaguacgccuaccag

SEQ ID NO: 42895 - DNA, 21 bp, homo sapiens
tagagctgctgatgactgaga

SEQ ID NO: 42896 - RNA, 21 nt, RNAi
gagcugcugaugacugagauu

SEQ ID NO: 42897 - RNA, 21 nt, RNAi
uucucgacgacuacugacucu

SEQ ID NO: 42898 - DNA, 21 bp, homo sapiens
tacggcagaccagaacctgaa

SEQ ID NO: 42899 - RNA, 21 nt, RNAi
cggcagaccagaaccugaauu

SEQ ID NO: 42900 - RNA, 21 nt, RNAi
uugccgucuggucuuggacuu

SEQ ID NO: 42901 - DNA, 21 bp, homo sapiens
tacgaggcagttgctaacaga

SEQ ID NO: 42902 - RNA, 21 nt, RNAi
cgaggcaguugcuaacagauu

SEQ ID NO: 42903 - RNA, 21 nt, RNAi
uugcuccgucaacgauugucu

SEQ ID NO: 42904 - DNA, 21 bp, homo sapiens
taacagactgtttgaaatggc

SEQ ID NO: 42905 - RNA, 21 nt, RNAi
acagacuguuugaaauggcuu

SEQ ID NO: 42906 - RNA, 21 nt, RNAi
uuugucugacaaacuuuaccg

SEQ ID NO: 42907 - DNA, 21 bp, homo sapiens
tacaaagtgatccggaagctg

SEQ ID NO: 42908 - RNA, 21 nt, RNAi
caaagugauccggaagcuguu

SEQ ID NO: 42909 - RNA, 21 nt, RNAi
uuguuucacuaggccuucgac

SEQ ID NO: 42910 - DNA, 21 bp, homo sapiens
tagactcaggaccgtggctcc

SEQ ID NO: 42911 - RNA, 21 nt, RNAi
gacucaggaccguggcuccuu

SEQ ID NO: 42912 - RNA, 21 nt, RNAi
uucugaguccuggcaccgagg

SEQ ID NO: 42913 - DNA, 21 bp, homo sapiens
taggctgtggctggccttgtg

SEQ ID NO: 42914 - RNA, 21 nt, RNAi
ggcuguggcuggccuuguguu

SEQ ID NO: 42915 - RNA, 21 nt, RNAi
uuccgacaccgaccggaacac

SEQ ID NO: 42916 - DNA, 21 bp, homo sapiens
tagccaggcgtggtggcacat

SEQ ID NO: 42917 - RNA, 21 nt, RNAi
gccaggcgugguggcacauuu

SEQ ID NO: 42918 - RNA, 21 nt, RNAi
uucgguccgcaccaccgugua

SEQ ID NO: 42919 - DNA, 21 bp, homo sapiens
taagatcacgccattgcactc

SEQ ID NO: 42920 - RNA, 21 nt, RNAi
agaucacgccauugcacucuu

SEQ ID NO: 42921 - RNA, 21 nt, RNAi
uuucuagugcgguaacgugag

SEQ ID NO: 42922 - DNA, 21 bp, homo sapiens
aattctacatgctcatgcgga

SEQ ID NO: 42923 - RNA, 21 nt, RNAi
uucuacaugcucaugcggauu

SEQ ID NO: 42924 - RNA, 21 nt, RNAi
uuaagauguacgaguacgccu

SEQ ID NO: 42925 - DNA, 21 bp, homo sapiens
aagagccacttcatcgagatc

SEQ ID NO: 42926 - RNA, 21 nt, RNAi
gagccacuucaucgagaucuu

SEQ ID NO: 42927 - RNA, 21 nt, RNAi
uucucggugaaguagcucuag

SEQ ID NO: 42928 - DNA, 21 bp, homo sapiens
aacaacatcactcgaggcatc

SEQ ID NO: 42929 - RNA, 21 nt, RNAi
caacaucacucgaggcaucuu

SEQ ID NO: 42930 - RNA, 21 nt, RNAi
uuguuguagugagcuccguag

SEQ ID NO: 42931 - DNA, 21 bp, homo sapiens
aacatcactcgaggcatcttt

SEQ ID NO: 42932 - RNA, 21 nt, RNAi
caucacucgaggcaucuuuuu

SEQ ID NO: 42933 - RNA, 21 nt, RNAi
uuguagugagcuccguagaaa

SEQ ID NO: 42934 - DNA, 21 bp, homo sapiens
aacagaaagcgtctctacaaa

SEQ ID NO: 42935 - RNA, 21 nt, RNAi
cagaaagcgucucuacaaauu

SEQ ID NO: 42936 - RNA, 21 nt, RNAi
uugucuuucgcagagauguuu

SEQ ID NO: 42937 - DNA, 21 bp, homo sapiens
caacatcactcgaggcatctt

SEQ ID NO: 42938 - RNA, 21 nt, RNAi
acaucacucgaggcaucuuuu

SEQ ID NO: 42939 - RNA, 21 nt, RNAi
uuuguagugagcuccguagaa

SEQ ID NO: 42940 - DNA, 21 bp, homo sapiens
catcactcgaggcatctttga

SEQ ID NO: 42941 - RNA, 21 nt, RNAi
ucacucgaggcaucuuugauu

SEQ ID NO: 42942 - RNA, 21 nt, RNAi
uuagugagcuccguagaaacu

SEQ ID NO: 42943 - DNA, 21 bp, homo sapiens
catctttgagacgattgtgga

SEQ ID NO: 42944 - RNA, 21 nt, RNAi
ucuuugagacgauuguggauu

SEQ ID NO: 42945 - RNA, 21 nt, RNAi
uuagaaacucugcuaacaccu

SEQ ID NO: 42946 - DNA, 21 bp, homo sapiens
cagtttgactacgaggcagtt

SEQ ID NO: 42947 - RNA, 21 nt, RNAi
guuugacuacgaggcaguuuu

SEQ ID NO: 42948 - RNA, 21 nt, RNAi
uucaaacugaugcuccgucaa

SEQ ID NO: 42949 - DNA, 21 bp, homo sapiens
cagaacagaaagcgtctctac

SEQ ID NO: 42950 - RNA, 21 nt, RNAi
gaacagaaagcgucucuacuu

SEQ ID NO: 42951 - RNA, 21 nt, RNAi
uucuugucuuucgcagagaug

SEQ ID NO: 42952 - DNA, 21 bp, homo sapiens
cagaaagcgtctctacaaagt

SEQ ID NO: 42953 - RNA, 21 nt, RNAi
gaaagcgucucuacaaaguuu

SEQ ID NO: 42954 - RNA, 21 nt, RNAi
uucuuucgcagagauguuuca

SEQ ID NO: 42955 - DNA, 21 bp, homo sapiens
gatggtcctgaacgagtcctt

SEQ ID NO: 42956 - RNA, 21 nt, RNAi
ugguccugaacgaguccuuuu

SEQ ID NO: 42957 - RNA, 21 nt, RNAi
uuaccaggacuugcucaggaa

SEQ ID NO: 42958 - DNA, 21 bp, homo sapiens
gaacgagtccttgaaggttct

SEQ ID NO: 42959 - RNA, 21 nt, RNAi
acgaguccuugaagguucuuu

SEQ ID NO: 42960 - RNA, 21 nt, RNAi
uuugcucaggaacuuccaaga

SEQ ID NO: 42961 - DNA, 21 bp, homo sapiens
gaagaaagacagatcgaggag

SEQ ID NO: 42962 - RNA, 21 nt, RNAi
agaaagacagaucgaggaguu

SEQ ID NO: 42963 - RNA, 21 nt, RNAi
uuucuuucugucuagcuccuc

SEQ ID NO: 42964 - DNA, 21 bp, homo sapiens
gaagagccacttcatcgagat

SEQ ID NO: 42965 - RNA, 21 nt, RNAi
agagccacuucaucgagauuu

SEQ ID NO: 42966 - RNA, 21 nt, RNAi
uuucucggugaaguagcucua

SEQ ID NO: 42967 - DNA, 21 bp, homo sapiens
gagccacttcatcgagatctt

SEQ ID NO: 42968 - RNA, 21 nt, RNAi
gccacuucaucgagaucuuuu

SEQ ID NO: 42969 - RNA, 21 nt, RNAi
uucggugaaguagcucuagaa

SEQ ID NO: 42970 - DNA, 21 bp, homo sapiens
gaacaacatcactcgaggcat

SEQ ID NO: 42971 - RNA, 21 nt, RNAi
acaacaucacucgaggcauuu

SEQ ID NO: 42972 - RNA, 21 nt, RNAi
uuuguuguagugagcuccgua

SEQ ID NO: 42973 - DNA, 21 bp, homo sapiens
gaggcatctttgagacgattg

SEQ ID NO: 42974 - RNA, 21 nt, RNAi
ggcaucuuugagacgauuguu

SEQ ID NO: 42975 - RNA, 21 nt, RNAi
uuccguagaaacucugcuaac

SEQ ID NO: 42976 - DNA, 21 bp, homo sapiens
gacctcctgaatgaactggac

SEQ ID NO: 42977 - RNA, 21 nt, RNAi
ccuccugaaugaacuggacuu

SEQ ID NO: 42978 - RNA, 21 nt, RNAi
uuggaggacuuacuugaccug

SEQ ID NO: 42979 - DNA, 21 bp, homo sapiens
gactacgaggcagttgctaac

SEQ ID NO: 42980 - RNA, 21 nt, RNAi
cuacgaggcaguugcuaacuu

SEQ ID NO: 42981 - RNA, 21 nt, RNAi
uugaugcuccgucaacgauug

SEQ ID NO: 42982 - DNA, 21 bp, homo sapiens
gaggcagttgctaacagactg

SEQ ID NO: 42983 - RNA, 21 nt, RNAi
ggcaguugcuaacagacuguu

SEQ ID NO: 42984 - RNA, 21 nt, RNAi
uuccgucaacgauugucugac

SEQ ID NO: 42985 - DNA, 21 bp, homo sapiens
gactgtttgaaatggccagcc

SEQ ID NO: 42986 - RNA, 21 nt, RNAi
cuguuugaaauggccagccuu

SEQ ID NO: 42987 - RNA, 21 nt, RNAi
uugacaaacuuuaccggucgg

SEQ ID NO: 42988 - DNA, 21 bp, homo sapiens
gaacagaaagcgtctctacaa

SEQ ID NO: 42989 - RNA, 21 nt, RNAi
acagaaagcgucucuacaauu

SEQ ID NO: 42990 - RNA, 21 nt, RNAi
uuugucuuucgcagagauguu

SEQ ID NO: 42991 - DNA, 21 bp, homo sapiens
gaaagcgtctctacaaagtga

SEQ ID NO: 42992 - RNA, 21 nt, RNAi
aagcgucucuacaaagugauu

SEQ ID NO: 42993 - RNA, 21 nt, RNAi
uuuucgcagagauguuucacu

SEQ ID NO: 42994 - DNA, 21 bp, homo sapiens
tacgaggcagttgctaacaga

SEQ ID NO: 42995 - RNA, 21 nt, RNAi
cgaggcaguugcuaacagauu

SEQ ID NO: 42996 - RNA, 21 nt, RNAi
uugcuccgucaacgauugucu

SEQ ID NO: 42997 - DNA, 21 bp, homo sapiens
aacaacggaacgcgttcggaa

SEQ ID NO: 42998 - RNA, 21 nt, RNAi
caacggaacgcguucggaauu

SEQ ID NO: 42999 - RNA, 21 nt, RNAi
uuguugccuugcgcaagccuu

SEQ ID NO: 43000 - DNA, 21 bp, homo sapiens
aacggaacgcgttcggaacgg

SEQ ID NO: 43001 - RNA, 21 nt, RNAi
cggaacgcguucggaacgguu

SEQ ID NO: 43002 - RNA, 21 nt, RNAi
uugccuugcgcaagccuugcc

SEQ ID NO: 43003 - DNA, 21 bp, homo sapiens
aactgaagcggcagtagccgg

SEQ ID NO: 43004 - RNA, 21 nt, RNAi
cugaagcggcaguagccgguu

SEQ ID NO: 43005 - RNA, 21 nt, RNAi
uugacuucgccgucaucggcc

SEQ ID NO: 43006 - DNA, 21 bp, homo sapiens
aaccgcttgccagacgccgaa

SEQ ID NO: 43007 - RNA, 21 nt, RNAi
ccgcuugccagacgccgaauu

SEQ ID NO: 43008 - RNA, 21 nt, RNAi
uuggcgaacggucugcggcuu

SEQ ID NO: 43009 - DNA, 21 bp, homo sapiens
aagccacaagccgagcacata

SEQ ID NO: 43010 - RNA, 21 nt, RNAi
gccacaagccgagcacauauu

SEQ ID NO: 43011 - RNA, 21 nt, RNAi
uucgguguucggcucguguau

SEQ ID NO: 43012 - DNA, 21 bp, homo sapiens
aagccgagcacataagccagg

SEQ ID NO: 43013 - RNA, 21 nt, RNAi
gccgagcacauaagccagguu

SEQ ID NO: 43014 - RNA, 21 nt, RNAi
uucggcucguguauucggucc

SEQ ID NO: 43015 - DNA, 21 bp, homo sapiens
aagccaggtcctaacggagcc

SEQ ID NO: 43016 - RNA, 21 nt, RNAi
gccagguccuaacggagccuu

SEQ ID NO: 43017 - RNA, 21 nt, RNAi
uucgguccaggauugccucgg

SEQ ID NO: 43018 - DNA, 21 bp, homo sapiens
aacggagcctatgtgtaagtc

SEQ ID NO: 43019 - RNA, 21 nt, RNAi
cggagccuauguguaagucuu

SEQ ID NO: 43020 - RNA, 21 nt, RNAi
uugccucggauacacauucag

SEQ ID NO: 43021 - DNA, 21 bp, homo sapiens
aagtccactactggtgcaagg

SEQ ID NO: 43022 - RNA, 21 nt, RNAi
guccacuacuggugcaagguu

SEQ ID NO: 43023 - RNA, 21 nt, RNAi
uucaggugaugaccacguucc

SEQ ID NO: 43024 - DNA, 21 bp, homo sapiens
aaggttgcacacttctaagaa

SEQ ID NO: 43025 - RNA, 21 nt, RNAi
gguugcacacuucuaagaauu

SEQ ID NO: 43026 - RNA, 21 nt, RNAi
uuccaacgugugaagauucuu

SEQ ID NO: 43027 - DNA, 21 bp, homo sapiens
aagacacagcctgatgcttgt

SEQ ID NO: 43028 - RNA, 21 nt, RNAi
gacacagccugaugcuuguuu

SEQ ID NO: 43029 - RNA, 21 nt, RNAi
uucugugucggacuacgaaca

SEQ ID NO: 43030 - DNA, 21 bp, homo sapiens
aactgcaattggtggctttga

SEQ ID NO: 43031 - RNA, 21 nt, RNAi
cugcaauugguggcuuugauu

SEQ ID NO: 43032 - RNA, 21 nt, RNAi
uugacguuaaccaccgaaacu

SEQ ID NO: 43033 - DNA, 21 bp, homo sapiens
aattggtggctttgaaggcgc

SEQ ID NO: 43034 - RNA, 21 nt, RNAi
uugguggcuuugaaggcgcuu

SEQ ID NO: 43035 - RNA, 21 nt, RNAi
uuaaccaccgaaacuuccgcg

SEQ ID NO: 43036 - DNA, 21 bp, homo sapiens
aacagctcttgaggagtgaga

SEQ ID NO: 43037 - RNA, 21 nt, RNAi
cagcucuugaggagugagauu

SEQ ID NO: 43038 - RNA, 21 nt, RNAi
uugucgagaacuccucacucu

SEQ ID NO: 43039 - DNA, 21 bp, homo sapiens
aaagagatggatgagactgtt

SEQ ID NO: 43040 - RNA, 21 nt, RNAi
agagauggaugagacuguuuu

SEQ ID NO: 43041 - RNA, 21 nt, RNAi
uuucucuaccuacucugacaa

SEQ ID NO: 43042 - DNA, 21 bp, homo sapiens
aagagatggatgagactgttg

SEQ ID NO: 43043 - RNA, 21 nt, RNAi
gagauggaugagacuguuguu

SEQ ID NO: 43044 - RNA, 21 nt, RNAi
uucucuaccuacucugacaac

SEQ ID NO: 43045 - DNA, 21 bp, homo sapiens
aatgaactgacaacaatcctg

SEQ ID NO: 43046 - RNA, 21 nt, RNAi
ugaacugacaacaauccuguu

SEQ ID NO: 43047 - RNA, 21 nt, RNAi
uuacuugacuguuguuaggac

SEQ ID NO: 43048 - DNA, 21 bp, homo sapiens
aactgacaacaatcctgaagg

SEQ ID NO: 43049 - RNA, 21 nt, RNAi
cugacaacaauccugaagguu

SEQ ID NO: 43050 - RNA, 21 nt, RNAi
uugacuguuguuaggacuucc

SEQ ID NO: 43051 - DNA, 21 bp, homo sapiens
aaatcaactgcagactgtaaa

SEQ ID NO: 43052 - RNA, 21 nt, RNAi
aucaacugcagacuguaaauu

SEQ ID NO: 43053 - RNA, 21 nt, RNAi
uuuaguugacgucugacauuu

SEQ ID NO: 43054 - DNA, 21 bp, homo sapiens
aatcaactgcagactgtaaat

SEQ ID NO: 43055 - RNA, 21 nt, RNAi
ucaacugcagacuguaaauuu

SEQ ID NO: 43056 - RNA, 21 nt, RNAi
uuaguugacgucugacauuua

SEQ ID NO: 43057 - DNA, 21 bp, homo sapiens
aactgcagactgtaaatttcc

SEQ ID NO: 43058 - RNA, 21 nt, RNAi
cugcagacuguaaauuuccuu

SEQ ID NO: 43059 - RNA, 21 nt, RNAi
uugacgucugacauuuaaagg

SEQ ID NO: 43060 - DNA, 21 bp, homo sapiens
aaatttccgacagagaaagga

SEQ ID NO: 43061 - RNA, 21 nt, RNAi
auuuccgacagagaaaggauu

SEQ ID NO: 43062 - RNA, 21 nt, RNAi
uuuaaaggcugucucuuuccu

SEQ ID NO: 43063 - DNA, 21 bp, homo sapiens
aatttccgacagagaaaggaa

SEQ ID NO: 43064 - RNA, 21 nt, RNAi
uuuccgacagagaaaggaauu

SEQ ID NO: 43065 - RNA, 21 nt, RNAi
uuaaaggcugucucuuuccuu

SEQ ID NO: 43066 - DNA, 21 bp, homo sapiens
aaaggaatctgtagttcagca

SEQ ID NO: 43067 - RNA, 21 nt, RNAi
aggaaucuguaguucagcauu

SEQ ID NO: 43068 - RNA, 21 nt, RNAi
uuuccuuagacaucaagucgu

SEQ ID NO: 43069 - DNA, 21 bp, homo sapiens
aaggaatctgtagttcagcac

SEQ ID NO: 43070 - RNA, 21 nt, RNAi
ggaaucuguaguucagcacuu

SEQ ID NO: 43071 - RNA, 21 nt, RNAi
uuccuuagacaucaagucgug

SEQ ID NO: 43072 - DNA, 21 bp, homo sapiens
aatctgtagttcagcacttga

SEQ ID NO: 43073 - RNA, 21 nt, RNAi
ucuguaguucagcacuugauu

SEQ ID NO: 43074 - RNA, 21 nt, RNAi
uuagacaucaagucgugaacu

SEQ ID NO: 43075 - DNA, 21 bp, homo sapiens
aaagcgtgcaagtatcagtga

SEQ ID NO: 43076 - RNA, 21 nt, RNAi
agcgugcaaguaucagugauu

SEQ ID NO: 43077 - RNA, 21 nt, RNAi
uuucgcacguucauagucacu

SEQ ID NO: 43078 - DNA, 21 bp, homo sapiens
aagcgtgcaagtatcagtgat

SEQ ID NO: 43079 - RNA, 21 nt, RNAi
gcgugcaaguaucagugauuu

SEQ ID NO: 43080 - RNA, 21 nt, RNAi
uucgcacguucauagucacua

SEQ ID NO: 43081 - DNA, 21 bp, homo sapiens
aatttcatcagcaccagaaag

SEQ ID NO: 43082 - RNA, 21 nt, RNAi
uuucaucagcaccagaaaguu

SEQ ID NO: 43083 - RNA, 21 nt, RNAi
uuaaaguagucguggucuuuc

SEQ ID NO: 43084 - DNA, 21 bp, homo sapiens
aaaggaccaggtgaagatgtt

SEQ ID NO: 43085 - RNA, 21 nt, RNAi
aggaccaggugaagauguuuu

SEQ ID NO: 43086 - RNA, 21 nt, RNAi
uuuccugguccacuucuacaa

SEQ ID NO: 43087 - DNA, 21 bp, homo sapiens
aaggaccaggtgaagatgttg

SEQ ID NO: 43088 - RNA, 21 nt, RNAi
ggaccaggugaagauguuguu

SEQ ID NO: 43089 - RNA, 21 nt, RNAi
uuccugguccacuucuacaac

SEQ ID NO: 43090 - DNA, 21 bp, homo sapiens
aaatgtgacagtcagcttcag

SEQ ID NO: 43091 - RNA, 21 nt, RNAi
augugacagucagcuucaguu

SEQ ID NO: 43092 - RNA, 21 nt, RNAi
uuuacacugucagucgaaguc

SEQ ID NO: 43093 - DNA, 21 bp, homo sapiens
aatgtgacagtcagcttcaga

SEQ ID NO: 43094 - RNA, 21 nt, RNAi
ugugacagucagcuucagauu

SEQ ID NO: 43095 - RNA, 21 nt, RNAi
uuacacugucagucgaagucu

SEQ ID NO: 43096 - DNA, 21 bp, homo sapiens
aaactgaggagaatgcagtct

SEQ ID NO: 43097 - RNA, 21 nt, RNAi
acugaggagaaugcagucuuu

SEQ ID NO: 43098 - RNA, 21 nt, RNAi
uuugacuccucuuacgucaga

SEQ ID NO: 43099 - DNA, 21 bp, homo sapiens
aactgaggagaatgcagtctg

SEQ ID NO: 43100 - RNA, 21 nt, RNAi
cugaggagaaugcagucuguu

SEQ ID NO: 43101 - RNA, 21 nt, RNAi
uugacuccucuuacgucagac

SEQ ID NO: 43102 - DNA, 21 bp, homo sapiens
aatgcagtctggattcgaatt

SEQ ID NO: 43103 - RNA, 21 nt, RNAi
ugcagucuggauucgaauuuu

SEQ ID NO: 43104 - RNA, 21 nt, RNAi
uuacgucagaccuaagcuuaa

SEQ ID NO: 43105 - DNA, 21 bp, homo sapiens
aacacagtacacaaagccaaa

SEQ ID NO: 43106 - RNA, 21 nt, RNAi
cacaguacacaaagccaaauu

SEQ ID NO: 43107 - RNA, 21 nt, RNAi
uugugucauguguuucgguuu

SEQ ID NO: 43108 - DNA, 21 bp, homo sapiens
aaagccaaaccagtacaaacc

SEQ ID NO: 43109 - RNA, 21 nt, RNAi
agccaaaccaguacaaaccuu

SEQ ID NO: 43110 - RNA, 21 nt, RNAi
uuucgguuuggucauguuugg

SEQ ID NO: 43111 - DNA, 21 bp, homo sapiens
aagccaaaccagtacaaacct

SEQ ID NO: 43112 - RNA, 21 nt, RNAi
gccaaaccaguacaaaccuuu

SEQ ID NO: 43113 - RNA, 21 nt, RNAi
uucgguuuggucauguuugga

SEQ ID NO: 43114 - DNA, 21 bp, homo sapiens
aaaccagtacaaacctaccta

SEQ ID NO: 43115 - RNA, 21 nt, RNAi
accaguacaaaccuaccuauu

SEQ ID NO: 43116 - RNA, 21 nt, RNAi
uuuggucauguuuggauggau

SEQ ID NO: 43117 - DNA, 21 bp, homo sapiens
aaccagtacaaacctacctac

SEQ ID NO: 43118 - RNA, 21 nt, RNAi
ccaguacaaaccuaccuacuu

SEQ ID NO: 43119 - RNA, 21 nt, RNAi
uuggucauguuuggauggaug

SEQ ID NO: 43120 - DNA, 21 bp, homo sapiens
aaacctacctacgtggtgtac

SEQ ID NO: 43121 - RNA, 21 nt, RNAi
accuaccuacgugguguacuu

SEQ ID NO: 43122 - RNA, 21 nt, RNAi
uuuggauggaugcaccacaug

SEQ ID NO: 43123 - DNA, 21 bp, homo sapiens
aacctacctacgtggtgtact

SEQ ID NO: 43124 - RNA, 21 nt, RNAi
ccuaccuacgugguguacuuu

SEQ ID NO: 43125 - RNA, 21 nt, RNAi
uuggauggaugcaccacauga

SEQ ID NO: 43126 - DNA, 21 bp, homo sapiens
aaatctacctccgacaagagg

SEQ ID NO: 43127 - RNA, 21 nt, RNAi
aucuaccuccgacaagagguu

SEQ ID NO: 43128 - RNA, 21 nt, RNAi
uuuagauggaggcuguucucc

SEQ ID NO: 43129 - DNA, 21 bp, homo sapiens
aatctacctccgacaagagga

SEQ ID NO: 43130 - RNA, 21 nt, RNAi
ucuaccuccgacaagaggauu

SEQ ID NO: 43131 - RNA, 21 nt, RNAi
uuagauggaggcuguucuccu

SEQ ID NO: 43132 - DNA, 21 bp, homo sapiens
aagaaagcttgcaattagtga

SEQ ID NO: 43133 - RNA, 21 nt, RNAi
gaaagcuugcaauuagugauu

SEQ ID NO: 43134 - RNA, 21 nt, RNAi
uucuuucgaacguuaaucacu

SEQ ID NO: 43135 - DNA, 21 bp, homo sapiens
aaagcttgcaattagtgaaca

SEQ ID NO: 43136 - RNA, 21 nt, RNAi
agcuugcaauuagugaacauu

SEQ ID NO: 43137 - RNA, 21 nt, RNAi
uuucgaacguuaaucacuugu

SEQ ID NO: 43138 - DNA, 21 bp, homo sapiens
aagcttgcaattagtgaacat

SEQ ID NO: 43139 - RNA, 21 nt, RNAi
gcuugcaauuagugaacauuu

SEQ ID NO: 43140 - RNA, 21 nt, RNAi
uucgaacguuaaucacuugua

SEQ ID NO: 43141 - DNA, 21 bp, homo sapiens
caacggaacgcgttcggaacg

SEQ ID NO: 43142 - RNA, 21 nt, RNAi
acggaacgcguucggaacguu

SEQ ID NO: 43143 - RNA, 21 nt, RNAi
uuugccuugcgcaagccuugc

SEQ ID NO: 43144 - DNA, 21 bp, homo sapiens
cagacagctgaaccgcttgcc

SEQ ID NO: 43145 - RNA, 21 nt, RNAi
gacagcugaaccgcuugccuu

SEQ ID NO: 43146 - RNA, 21 nt, RNAi
uucugucgacuuggcgaacgg

SEQ ID NO: 43147 - DNA, 21 bp, homo sapiens
cagctgaaccgcttgccagac

SEQ ID NO: 43148 - RNA, 21 nt, RNAi
gcugaaccgcuugccagacuu

SEQ ID NO: 43149 - RNA, 21 nt, RNAi
uucgacuuggcgaacggucug

SEQ ID NO: 43150 - DNA, 21 bp, homo sapiens
cacggcagcgtctaagccaca

SEQ ID NO: 43151 - RNA, 21 nt, RNAi
cggcagcgucuaagccacauu

SEQ ID NO: 43152 - RNA, 21 nt, RNAi
uugccgucgcagauucggugu

SEQ ID NO: 43153 - DNA, 21 bp, homo sapiens
cagcgtctaagccacaagccg

SEQ ID NO: 43154 - RNA, 21 nt, RNAi
gcgucuaagccacaagccguu

SEQ ID NO: 43155 - RNA, 21 nt, RNAi
uucgcagauucgguguucggc

SEQ ID NO: 43156 - DNA, 21 bp, homo sapiens
cacaagccgagcacataagcc

SEQ ID NO: 43157 - RNA, 21 nt, RNAi
caagccgagcacauaagccuu

SEQ ID NO: 43158 - RNA, 21 nt, RNAi
uuguucggcucguguauucgg

SEQ ID NO: 43159 - DNA, 21 bp, homo sapiens
caagccgagcacataagccag

SEQ ID NO: 43160 - RNA, 21 nt, RNAi
agccgagcacauaagccaguu

SEQ ID NO: 43161 - RNA, 21 nt, RNAi
uuucggcucguguauucgguc

SEQ ID NO: 43162 - DNA, 21 bp, homo sapiens
cacataagccaggtcctaacg

SEQ ID NO: 43163 - RNA, 21 nt, RNAi
cauaagccagguccuaacguu

SEQ ID NO: 43164 - RNA, 21 nt, RNAi
uuguauucgguccaggauugc

SEQ ID NO: 43165 - DNA, 21 bp, homo sapiens
cataagccaggtcctaacgga

SEQ ID NO: 43166 - RNA, 21 nt, RNAi
uaagccagguccuaacggauu

SEQ ID NO: 43167 - RNA, 21 nt, RNAi
uuauucgguccaggauugccu

SEQ ID NO: 43168 - DNA, 21 bp, homo sapiens
caggtcctaacggagcctatg

SEQ ID NO: 43169 - RNA, 21 nt, RNAi
gguccuaacggagccuauguu

SEQ ID NO: 43170 - RNA, 21 nt, RNAi
uuccaggauugccucggauac

SEQ ID NO: 43171 - DNA, 21 bp, homo sapiens
cactactggtgcaaggttgca

SEQ ID NO: 43172 - RNA, 21 nt, RNAi
cuacuggugcaagguugcauu

SEQ ID NO: 43173 - RNA, 21 nt, RNAi
uugaugaccacguuccaacgu

SEQ ID NO: 43174 - DNA, 21 bp, homo sapiens
caaggttgcacacttctaaga

SEQ ID NO: 43175 - RNA, 21 nt, RNAi
agguugcacacuucuaagauu

SEQ ID NO: 43176 - RNA, 21 nt, RNAi
uuuccaacgugugaagauucu

SEQ ID NO: 43177 - DNA, 21 bp, homo sapiens
cacacttctaagaagagcggc

SEQ ID NO: 43178 - RNA, 21 nt, RNAi
cacuucuaagaagagcggcuu

SEQ ID NO: 43179 - RNA, 21 nt, RNAi
uugugaagauucuucucgccg

SEQ ID NO: 43180 - DNA, 21 bp, homo sapiens
cacttctaagaagagcggcgt

SEQ ID NO: 43181 - RNA, 21 nt, RNAi
cuucuaagaagagcggcguuu

SEQ ID NO: 43182 - RNA, 21 nt, RNAi
uugaagauucuucucgccgca

SEQ ID NO: 43183 - DNA, 21 bp, homo sapiens
caagacacagcctgatgcttg

SEQ ID NO: 43184 - RNA, 21 nt, RNAi
agacacagccugaugcuuguu

SEQ ID NO: 43185 - RNA, 21 nt, RNAi
uuucugugucggacuacgaac

SEQ ID NO: 43186 - DNA, 21 bp, homo sapiens
cacagcctgatgcttgtgctc

SEQ ID NO: 43187 - RNA, 21 nt, RNAi
cagccugaugcuugugcucuu

SEQ ID NO: 43188 - RNA, 21 nt, RNAi
uugucggacuacgaacacgag

SEQ ID NO: 43189 - DNA, 21 bp, homo sapiens
cagcctgatgcttgtgctccg

SEQ ID NO: 43190 - RNA, 21 nt, RNAi
gccugaugcuugugcuccguu

SEQ ID NO: 43191 - RNA, 21 nt, RNAi
uucggacuacgaacacgaggc

SEQ ID NO: 43192 - DNA, 21 bp, homo sapiens
caattggtggctttgaaggcg

SEQ ID NO: 43193 - RNA, 21 nt, RNAi
auugguggcuuugaaggcguu

SEQ ID NO: 43194 - RNA, 21 nt, RNAi
uuuaaccaccgaaacuuccgc

SEQ ID NO: 43195 - DNA, 21 bp, homo sapiens
cagctcttgaggagtgagact

SEQ ID NO: 43196 - RNA, 21 nt, RNAi
gcucuugaggagugagacuuu

SEQ ID NO: 43197 - RNA, 21 nt, RNAi
uucgagaacuccucacucuga

SEQ ID NO: 43198 - DNA, 21 bp, homo sapiens
caaagagatggatgagactgt

SEQ ID NO: 43199 - RNA, 21 nt, RNAi
aagagauggaugagacuguuu

SEQ ID NO: 43200 - RNA, 21 nt, RNAi
uuuucucuaccuacucugaca

SEQ ID NO: 43201 - DNA, 21 bp, homo sapiens
catcaagaggaccatcttgaa

SEQ ID NO: 43202 - RNA, 21 nt, RNAi
ucaagaggaccaucuugaauu

SEQ ID NO: 43203 - RNA, 21 nt, RNAi
uuaguucuccugguagaacuu

SEQ ID NO: 43204 - DNA, 21 bp, homo sapiens
catgaatgaactgacaacaat

SEQ ID NO: 43205 - RNA, 21 nt, RNAi
ugaaugaacugacaacaauuu

SEQ ID NO: 43206 - RNA, 21 nt, RNAi
uuacuuacuugacuguuguua

SEQ ID NO: 43207 - DNA, 21 bp, homo sapiens
caactgcagactgtaaatttc

SEQ ID NO: 43208 - RNA, 21 nt, RNAi
acugcagacuguaaauuucuu

SEQ ID NO: 43209 - RNA, 21 nt, RNAi
uuugacgucugacauuuaaag

SEQ ID NO: 43210 - DNA, 21 bp, homo sapiens
cagactgtaaatttccgacag

SEQ ID NO: 43211 - RNA, 21 nt, RNAi
gacuguaaauuuccgacaguu

SEQ ID NO: 43212 - RNA, 21 nt, RNAi
uucugacauuuaaaggcuguc

SEQ ID NO: 43213 - DNA, 21 bp, homo sapiens
cagagaaaggaatctgtagtt

SEQ ID NO: 43214 - RNA, 21 nt, RNAi
gagaaaggaaucuguaguuuu

SEQ ID NO: 43215 - RNA, 21 nt, RNAi
uucucuuuccuuagacaucaa

SEQ ID NO: 43216 - DNA, 21 bp, homo sapiens
cagcacttgatccatctgtgt

SEQ ID NO: 43217 - RNA, 21 nt, RNAi
gcacuugauccaucuguguuu

SEQ ID NO: 43218 - RNA, 21 nt, RNAi
uucgugaacuagguagacaca

SEQ ID NO: 43219 - DNA, 21 bp, homo sapiens
cacttgatccatctgtgtgag

SEQ ID NO: 43220 - RNA, 21 nt, RNAi
cuugauccaucugugugaguu

SEQ ID NO: 43221 - RNA, 21 nt, RNAi
uugaacuagguagacacacuc

SEQ ID NO: 43222 - DNA, 21 bp, homo sapiens
caatttcatcagcaccagaaa

SEQ ID NO: 43223 - RNA, 21 nt, RNAi
auuucaucagcaccagaaauu

SEQ ID NO: 43224 - RNA, 21 nt, RNAi
uuuaaaguagucguggucuuu

SEQ ID NO: 43225 - DNA, 21 bp, homo sapiens
catcagcaccagaaagtttgg

SEQ ID NO: 43226 - RNA, 21 nt, RNAi
ucagcaccagaaaguuugguu

SEQ ID NO: 43227 - RNA, 21 nt, RNAi
uuagucguggucuuucaaacc

SEQ ID NO: 43228 - DNA, 21 bp, homo sapiens
cagatgagtaaaggaccaggt

SEQ ID NO: 43229 - RNA, 21 nt, RNAi
gaugaguaaaggaccagguuu

SEQ ID NO: 43230 - RNA, 21 nt, RNAi
uucuacucauuuccuggucca

SEQ ID NO: 43231 - DNA, 21 bp, homo sapiens
caggtgaagatgttgaccttt

SEQ ID NO: 43232 - RNA, 21 nt, RNAi
ggugaagauguugaccuuuuu

SEQ ID NO: 43233 - RNA, 21 nt, RNAi
uuccacuucuacaacuggaaa

SEQ ID NO: 43234 - DNA, 21 bp, homo sapiens
cagtcagcttcagagaaactg

SEQ ID NO: 43235 - RNA, 21 nt, RNAi
gucagcuucagagaaacuguu

SEQ ID NO: 43236 - RNA, 21 nt, RNAi
uucagucgaagucucuuugac

SEQ ID NO: 43237 - DNA, 21 bp, homo sapiens
cagcttcagagaaactgagga

SEQ ID NO: 43238 - RNA, 21 nt, RNAi
gcuucagagaaacugaggauu

SEQ ID NO: 43239 - RNA, 21 nt, RNAi
uucgaagucucuuugacuccu

SEQ ID NO: 43240 - DNA, 21 bp, homo sapiens
cagagaaactgaggagaatgc

SEQ ID NO: 43241 - RNA, 21 nt, RNAi
gagaaacugaggagaaugcuu

SEQ ID NO: 43242 - RNA, 21 nt, RNAi
uucucuuugacuccucuuacg

SEQ ID NO: 43243 - DNA, 21 bp, homo sapiens
cagtctggattcgaattgcct

SEQ ID NO: 43244 - RNA, 21 nt, RNAi
gucuggauucgaauugccuuu

SEQ ID NO: 43245 - RNA, 21 nt, RNAi
uucagaccuaagcuuaacgga

SEQ ID NO: 43246 - DNA, 21 bp, homo sapiens
cacagtacacaaagccaaacc

SEQ ID NO: 43247 - RNA, 21 nt, RNAi
caguacacaaagccaaaccuu

SEQ ID NO: 43248 - RNA, 21 nt, RNAi
uugucauguguuucgguuugg

SEQ ID NO: 43249 - DNA, 21 bp, homo sapiens
cagtacacaaagccaaaccag

SEQ ID NO: 43250 - RNA, 21 nt, RNAi
guacacaaagccaaaccaguu

SEQ ID NO: 43251 - RNA, 21 nt, RNAi
uucauguguuucgguuugguc

SEQ ID NO: 43252 - DNA, 21 bp, homo sapiens
cacaaagccaaaccagtacaa

SEQ ID NO: 43253 - RNA, 21 nt, RNAi
caaagccaaaccaguacaauu

SEQ ID NO: 43254 - RNA, 21 nt, RNAi
uuguuucgguuuggucauguu

SEQ ID NO: 43255 - DNA, 21 bp, homo sapiens
caaagccaaaccagtacaaac

SEQ ID NO: 43256 - RNA, 21 nt, RNAi
aagccaaaccaguacaaacuu

SEQ ID NO: 43257 - RNA, 21 nt, RNAi
uuuucgguuuggucauguuug

SEQ ID NO: 43258 - DNA, 21 bp, homo sapiens
caaaccagtacaaacctacct

SEQ ID NO: 43259 - RNA, 21 nt, RNAi
aaccaguacaaaccuaccuuu

SEQ ID NO: 43260 - RNA, 21 nt, RNAi
uuuuggucauguuuggaugga

SEQ ID NO: 43261 - DNA, 21 bp, homo sapiens
cagtacaaacctacctacgtg

SEQ ID NO: 43262 - RNA, 21 nt, RNAi
guacaaaccuaccuacguguu

SEQ ID NO: 43263 - RNA, 21 nt, RNAi
uucauguuuggauggaugcac

SEQ ID NO: 43264 - DNA, 21 bp, homo sapiens
caaacctacctacgtggtgta

SEQ ID NO: 43265 - RNA, 21 nt, RNAi
aaccuaccuacgugguguauu

SEQ ID NO: 43266 - RNA, 21 nt, RNAi
uuuuggauggaugcaccacau

SEQ ID NO: 43267 - DNA, 21 bp, homo sapiens
cagactccgtacgccttcacg

SEQ ID NO: 43268 - RNA, 21 nt, RNAi
gacuccguacgccuucacguu

SEQ ID NO: 43269 - RNA, 21 nt, RNAi
uucugaggcaugcggaagugc

SEQ ID NO: 43270 - DNA, 21 bp, homo sapiens
cacgtcctcctccatgctgag

SEQ ID NO: 43271 - RNA, 21 nt, RNAi
cguccuccuccaugcugaguu

SEQ ID NO: 43272 - RNA, 21 nt, RNAi
uugcaggaggagguacgacuc

SEQ ID NO: 43273 - DNA, 21 bp, homo sapiens
catgctgaggcgcaatacacc

SEQ ID NO: 43274 - RNA, 21 nt, RNAi
ugcugaggcgcaauacaccuu

SEQ ID NO: 43275 - RNA, 21 nt, RNAi
uuacgacuccgcguuaugugg

SEQ ID NO: 43276 - DNA, 21 bp, homo sapiens
caattagtgaacatgaaagga

SEQ ID NO: 43277 - RNA, 21 nt, RNAi
auuagugaacaugaaaggauu

SEQ ID NO: 43278 - RNA, 21 nt, RNAi
uuuaaucacuuguacuuuccu

SEQ ID NO: 43279 - DNA, 21 bp, homo sapiens
gacctgaggaggaacaacgga

SEQ ID NO: 43280 - RNA, 21 nt, RNAi
ccugaggaggaacaacggauu

SEQ ID NO: 43281 - RNA, 21 nt, RNAi
uuggacuccuccuuguugccu

SEQ ID NO: 43282 - DNA, 21 bp, homo sapiens
gaggaggaacaacggaacgcg

SEQ ID NO: 43283 - RNA, 21 nt, RNAi
ggaggaacaacggaacgcguu

SEQ ID NO: 43284 - RNA, 21 nt, RNAi
uuccuccuuguugccuugcgc

SEQ ID NO: 43285 - DNA, 21 bp, homo sapiens
gaggaacaacggaacgcgttc

SEQ ID NO: 43286 - RNA, 21 nt, RNAi
ggaacaacggaacgcguucuu

SEQ ID NO: 43287 - RNA, 21 nt, RNAi
uuccuuguugccuugcgcaag

SEQ ID NO: 43288 - DNA, 21 bp, homo sapiens
gaacaacggaacgcgttcgga

SEQ ID NO: 43289 - RNA, 21 nt, RNAi
acaacggaacgcguucggauu

SEQ ID NO: 43290 - RNA, 21 nt, RNAi
uuuguugccuugcgcaagccu

SEQ ID NO: 43291 - DNA, 21 bp, homo sapiens
gagaactgaagcggcagtagc

SEQ ID NO: 43292 - RNA, 21 nt, RNAi
gaacugaagcggcaguagcuu

SEQ ID NO: 43293 - RNA, 21 nt, RNAi
uucuugacuucgccgucaucg

SEQ ID NO: 43294 - DNA, 21 bp, homo sapiens
gaactgaagcggcagtagccg

SEQ ID NO: 43295 - RNA, 21 nt, RNAi
acugaagcggcaguagccguu

SEQ ID NO: 43296 - RNA, 21 nt, RNAi
uuugacuucgccgucaucggc

SEQ ID NO: 43297 - DNA, 21 bp, homo sapiens
gagcagacagctgaaccgctt

SEQ ID NO: 43298 - RNA, 21 nt, RNAi
gcagacagcugaaccgcuuuu

SEQ ID NO: 43299 - RNA, 21 nt, RNAi
uucgucugucgacuuggcgaa

SEQ ID NO: 43300 - DNA, 21 bp, homo sapiens
gacagctgaaccgcttgccag

SEQ ID NO: 43301 - RNA, 21 nt, RNAi
cagcugaaccgcuugccaguu

SEQ ID NO: 43302 - RNA, 21 nt, RNAi
uugucgacuuggcgaacgguc

SEQ ID NO: 43303 - DNA, 21 bp, homo sapiens
gaggcacagtgagtccactgg

SEQ ID NO: 43304 - RNA, 21 nt, RNAi
ggcacagugaguccacugguu

SEQ ID NO: 43305 - RNA, 21 nt, RNAi
uuccgugucacucaggugacc

SEQ ID NO: 43306 - DNA, 21 bp, homo sapiens
gagcacataagccaggtccta

SEQ ID NO: 43307 - RNA, 21 nt, RNAi
gcacauaagccagguccuauu

SEQ ID NO: 43308 - RNA, 21 nt, RNAi
uucguguauucgguccaggau

SEQ ID NO: 43309 - DNA, 21 bp, homo sapiens
gagcctatgtgtaagtccact

SEQ ID NO: 43310 - RNA, 21 nt, RNAi
gccuauguguaaguccacuuu

SEQ ID NO: 43311 - RNA, 21 nt, RNAi
uucggauacacauucagguga

SEQ ID NO: 43312 - DNA, 21 bp, homo sapiens
gaccttcgcttcagtcgctcc

SEQ ID NO: 43313 - RNA, 21 nt, RNAi
ccuucgcuucagucgcuccuu

SEQ ID NO: 43314 - RNA, 21 nt, RNAi
uuggaagcgaagucagcgagg

SEQ ID NO: 43315 - DNA, 21 bp, homo sapiens
gacacagcctgatgcttgtgc

SEQ ID NO: 43316 - RNA, 21 nt, RNAi
cacagccugaugcuugugcuu

SEQ ID NO: 43317 - RNA, 21 nt, RNAi
uugugucggacuacgaacacg

SEQ ID NO: 43318 - DNA, 21 bp, homo sapiens
gaactgcaattggtggctttg

SEQ ID NO: 43319 - RNA, 21 nt, RNAi
acugcaauugguggcuuuguu

SEQ ID NO: 43320 - RNA, 21 nt, RNAi
uuugacguuaaccaccgaaac

SEQ ID NO: 43321 - DNA, 21 bp, homo sapiens
gaacagctcttgaggagtgag

SEQ ID NO: 43322 - RNA, 21 nt, RNAi
acagcucuugaggagugaguu

SEQ ID NO: 43323 - RNA, 21 nt, RNAi
uuugucgagaacuccucacuc

SEQ ID NO: 43324 - DNA, 21 bp, homo sapiens
gaggagtgagactgcaggaga

SEQ ID NO: 43325 - RNA, 21 nt, RNAi
ggagugagacugcaggagauu

SEQ ID NO: 43326 - RNA, 21 nt, RNAi
uuccucacucugacguccucu

SEQ ID NO: 43327 - DNA, 21 bp, homo sapiens
gagtgagactgcaggagatgt

SEQ ID NO: 43328 - RNA, 21 nt, RNAi
gugagacugcaggagauguuu

SEQ ID NO: 43329 - RNA, 21 nt, RNAi
uucacucugacguccucuaca

SEQ ID NO: 43330 - DNA, 21 bp, homo sapiens
gagatggatgagactgttgct

SEQ ID NO: 43331 - RNA, 21 nt, RNAi
gauggaugagacuguugcuuu

SEQ ID NO: 43332 - RNA, 21 nt, RNAi
uucuaccuacucugacaacga

SEQ ID NO: 43333 - DNA, 21 bp, homo sapiens
gatggatgagactgttgctga

SEQ ID NO: 43334 - RNA, 21 nt, RNAi
uggaugagacuguugcugauu

SEQ ID NO: 43335 - RNA, 21 nt, RNAi
uuaccuacucugacaacgacu

SEQ ID NO: 43336 - DNA, 21 bp, homo sapiens
gatgagactgttgctgagttc

SEQ ID NO: 43337 - RNA, 21 nt, RNAi
ugagacuguugcugaguucuu

SEQ ID NO: 43338 - RNA, 21 nt, RNAi
uuacucugacaacgacucaag

SEQ ID NO: 43339 - DNA, 21 bp, homo sapiens
gagactgttgctgagttcatc

SEQ ID NO: 43340 - RNA, 21 nt, RNAi
gacuguugcugaguucaucuu

SEQ ID NO: 43341 - RNA, 21 nt, RNAi
uucugacaacgacucaaguag

SEQ ID NO: 43342 - DNA, 21 bp, homo sapiens
gactgttgctgagttcatcaa

SEQ ID NO: 43343 - RNA, 21 nt, RNAi
cuguugcugaguucaucaauu

SEQ ID NO: 43344 - RNA, 21 nt, RNAi
uugacaacgacucaaguaguu

SEQ ID NO: 43345 - DNA, 21 bp, homo sapiens
gagttcatcaagaggaccatc

SEQ ID NO: 43346 - RNA, 21 nt, RNAi
guucaucaagaggaccaucuu

SEQ ID NO: 43347 - RNA, 21 nt, RNAi
uucaaguaguucuccugguag

SEQ ID NO: 43348 - DNA, 21 bp, homo sapiens
gaatgaactgacaacaatcct

SEQ ID NO: 43349 - RNA, 21 nt, RNAi
augaacugacaacaauccuuu

SEQ ID NO: 43350 - RNA, 21 nt, RNAi
uuuacuugacuguuguuagga

SEQ ID NO: 43351 - DNA, 21 bp, homo sapiens
gaactgacaacaatcctgaag

SEQ ID NO: 43352 - RNA, 21 nt, RNAi
acugacaacaauccugaaguu

SEQ ID NO: 43353 - RNA, 21 nt, RNAi
uuugacuguuguuaggacuuc

SEQ ID NO: 43354 - DNA, 21 bp, homo sapiens
gacaacaatcctgaaggcctg

SEQ ID NO: 43355 - RNA, 21 nt, RNAi
caacaauccugaaggccuguu

SEQ ID NO: 43356 - RNA, 21 nt, RNAi
uuguuguuaggacuuccggac

SEQ ID NO: 43357 - DNA, 21 bp, homo sapiens
gactgtaaatttccgacagag

SEQ ID NO: 43358 - RNA, 21 nt, RNAi
cuguaaauuuccgacagaguu

SEQ ID NO: 43359 - RNA, 21 nt, RNAi
uugacauuuaaaggcugucuc

SEQ ID NO: 43360 - DNA, 21 bp, homo sapiens
gacagagaaaggaatctgtag

SEQ ID NO: 43361 - RNA, 21 nt, RNAi
cagagaaaggaaucuguaguu

SEQ ID NO: 43362 - RNA, 21 nt, RNAi
uugucucuuuccuuagacauc

SEQ ID NO: 43363 - DNA, 21 bp, homo sapiens
gagaaaggaatctgtagttca

SEQ ID NO: 43364 - RNA, 21 nt, RNAi
gaaaggaaucuguaguucauu

SEQ ID NO: 43365 - RNA, 21 nt, RNAi
uucuuuccuuagacaucaagu

SEQ ID NO: 43366 - DNA, 21 bp, homo sapiens
gaaaggaatctgtagttcagc

SEQ ID NO: 43367 - RNA, 21 nt, RNAi
aaggaaucuguaguucagcuu

SEQ ID NO: 43368 - RNA, 21 nt, RNAi
uuuuccuuagacaucaagucg

SEQ ID NO: 43369 - DNA, 21 bp, homo sapiens
gaatctgtagttcagcacttg

SEQ ID NO: 43370 - RNA, 21 nt, RNAi
aucuguaguucagcacuuguu

SEQ ID NO: 43371 - RNA, 21 nt, RNAi
uuuagacaucaagucgugaac

SEQ ID NO: 43372 - DNA, 21 bp, homo sapiens
gatgagtaaaggaccaggtga

SEQ ID NO: 43373 - RNA, 21 nt, RNAi
ugaguaaaggaccaggugauu

SEQ ID NO: 43374 - RNA, 21 nt, RNAi
uuacucauuuccugguccacu

SEQ ID NO: 43375 - DNA, 21 bp, homo sapiens
gagtaaaggaccaggtgaaga

SEQ ID NO: 43376 - RNA, 21 nt, RNAi
guaaaggaccaggugaagauu

SEQ ID NO: 43377 - RNA, 21 nt, RNAi
uucauuuccugguccacuucu

SEQ ID NO: 43378 - DNA, 21 bp, homo sapiens
gaccaggtgaagatgttgacc

SEQ ID NO: 43379 - RNA, 21 nt, RNAi
ccaggugaagauguugaccuu

SEQ ID NO: 43380 - RNA, 21 nt, RNAi
uugguccacuucuacaacugg

SEQ ID NO: 43381 - DNA, 21 bp, homo sapiens
gacagtcagcttcagagaaac

SEQ ID NO: 43382 - RNA, 21 nt, RNAi
cagucagcuucagagaaacuu

SEQ ID NO: 43383 - RNA, 21 nt, RNAi
uugucagucgaagucucuuug

SEQ ID NO: 43384 - DNA, 21 bp, homo sapiens
gagaaactgaggagaatgcag

SEQ ID NO: 43385 - RNA, 21 nt, RNAi
gaaacugaggagaaugcaguu

SEQ ID NO: 43386 - RNA, 21 nt, RNAi
uucuuugacuccucuuacguc

SEQ ID NO: 43387 - DNA, 21 bp, homo sapiens
gaaactgaggagaatgcagtc

SEQ ID NO: 43388 - RNA, 21 nt, RNAi
aacugaggagaaugcagucuu

SEQ ID NO: 43389 - RNA, 21 nt, RNAi
uuuugacuccucuuacgucag

SEQ ID NO: 43390 - DNA, 21 bp, homo sapiens
gaggagaatgcagtctggatt

SEQ ID NO: 43391 - RNA, 21 nt, RNAi
ggagaaugcagucuggauuuu

SEQ ID NO: 43392 - RNA, 21 nt, RNAi
uuccucuuacgucagaccuaa

SEQ ID NO: 43393 - DNA, 21 bp, homo sapiens
gagaatgcagtctggattcga

SEQ ID NO: 43394 - RNA, 21 nt, RNAi
gaaugcagucuggauucgauu

SEQ ID NO: 43395 - RNA, 21 nt, RNAi
uucuuacgucagaccuaagcu

SEQ ID NO: 43396 - DNA, 21 bp, homo sapiens
gaatgcagtctggattcgaat

SEQ ID NO: 43397 - RNA, 21 nt, RNAi
augcagucuggauucgaauuu

SEQ ID NO: 43398 - RNA, 21 nt, RNAi
uuuacgucagaccuaagcuua

SEQ ID NO: 43399 - DNA, 21 bp, homo sapiens
gaacacagtacacaaagccaa

SEQ ID NO: 43400 - RNA, 21 nt, RNAi
acacaguacacaaagccaauu

SEQ ID NO: 43401 - RNA, 21 nt, RNAi
uuugugucauguguuucgguu

SEQ ID NO: 43402 - DNA, 21 bp, homo sapiens
gactccgtacgccttcacgtc

SEQ ID NO: 43403 - RNA, 21 nt, RNAi
cuccguacgccuucacgucuu

SEQ ID NO: 43404 - RNA, 21 nt, RNAi
uugaggcaugcggaagugcag

SEQ ID NO: 43405 - DNA, 21 bp, homo sapiens
gaggcgcaatacaccgcttct

SEQ ID NO: 43406 - RNA, 21 nt, RNAi
ggcgcaauacaccgcuucuuu

SEQ ID NO: 43407 - RNA, 21 nt, RNAi
uuccgcguuauguggcgaaga

SEQ ID NO: 43408 - DNA, 21 bp, homo sapiens
gaaatgaagaaagcttgcaat

SEQ ID NO: 43409 - RNA, 21 nt, RNAi
aaugaagaaagcuugcaauuu

SEQ ID NO: 43410 - RNA, 21 nt, RNAi
uuuuacuucuuucgaacguua

SEQ ID NO: 43411 - DNA, 21 bp, homo sapiens
gaagaaagcttgcaattagtg

SEQ ID NO: 43412 - RNA, 21 nt, RNAi
agaaagcuugcaauuaguguu

SEQ ID NO: 43413 - RNA, 21 nt, RNAi
uuucuuucgaacguuaaucac

SEQ ID NO: 43414 - DNA, 21 bp, homo sapiens
gaaagcttgcaattagtgaac

SEQ ID NO: 43415 - RNA, 21 nt, RNAi
aagcuugcaauuagugaacuu

SEQ ID NO: 43416 - RNA, 21 nt, RNAi
uuuucgaacguuaaucacuug

SEQ ID NO: 43417 - DNA, 21 bp, homo sapiens
taagccacaagccgagcacat

SEQ ID NO: 43418 - RNA, 21 nt, RNAi
agccacaagccgagcacauuu

SEQ ID NO: 43419 - RNA, 21 nt, RNAi
uuucgguguucggcucgugua

SEQ ID NO: 43420 - DNA, 21 bp, homo sapiens
taagccaggtcctaacggagc

SEQ ID NO: 43421 - RNA, 21 nt, RNAi
agccagguccuaacggagcuu

SEQ ID NO: 43422 - RNA, 21 nt, RNAi
uuucgguccaggauugccucg

SEQ ID NO: 43423 - DNA, 21 bp, homo sapiens
taacggagcctatgtgtaagt

SEQ ID NO: 43424 - RNA, 21 nt, RNAi
acggagccuauguguaaguuu

SEQ ID NO: 43425 - RNA, 21 nt, RNAi
uuugccucggauacacauuca

SEQ ID NO: 43426 - DNA, 21 bp, homo sapiens
tatgtgtaagtccactactgg

SEQ ID NO: 43427 - RNA, 21 nt, RNAi
uguguaaguccacuacugguu

SEQ ID NO: 43428 - RNA, 21 nt, RNAi
uuacacauucaggugaugacc

SEQ ID NO: 43429 - DNA, 21 bp, homo sapiens
taagtccactactggtgcaag

SEQ ID NO: 43430 - RNA, 21 nt, RNAi
aguccacuacuggugcaaguu

SEQ ID NO: 43431 - RNA, 21 nt, RNAi
uuucaggugaugaccacguuc

SEQ ID NO: 43432 - DNA, 21 bp, homo sapiens
tactggtgcaaggttgcacac

SEQ ID NO: 43433 - RNA, 21 nt, RNAi
cuggugcaagguugcacacuu

SEQ ID NO: 43434 - RNA, 21 nt, RNAi
uugaccacguuccaacgugug

SEQ ID NO: 43435 - DNA, 21 bp, homo sapiens
taaatttccgacagagaaagg

SEQ ID NO: 43436 - RNA, 21 nt, RNAi
aauuuccgacagagaaagguu

SEQ ID NO: 43437 - RNA, 21 nt, RNAi
uuuuaaaggcugucucuuucc

SEQ ID NO: 43438 - DNA, 21 bp, homo sapiens
tagttcagcacttgatccatc

SEQ ID NO: 43439 - RNA, 21 nt, RNAi
guucagcacuugauccaucuu

SEQ ID NO: 43440 - RNA, 21 nt, RNAi
uucaagucgugaacuagguag

SEQ ID NO: 43441 - DNA, 21 bp, homo sapiens
tatatgcaatttcatcagcac

SEQ ID NO: 43442 - RNA, 21 nt, RNAi
uaugcaauuucaucagcacuu

SEQ ID NO: 43443 - RNA, 21 nt, RNAi
uuauacguuaaaguagucgug

SEQ ID NO: 43444 - DNA, 21 bp, homo sapiens
tatgcaatttcatcagcacca

SEQ ID NO: 43445 - RNA, 21 nt, RNAi
ugcaauuucaucagcaccauu

SEQ ID NO: 43446 - RNA, 21 nt, RNAi
uuacguuaaaguagucguggu

SEQ ID NO: 43447 - DNA, 21 bp, homo sapiens
taaaggaccaggtgaagatgt

SEQ ID NO: 43448 - RNA, 21 nt, RNAi
aaggaccaggugaagauguuu

SEQ ID NO: 43449 - RNA, 21 nt, RNAi
uuuuccugguccacuucuaca

SEQ ID NO: 43450 - DNA, 21 bp, homo sapiens
tacacaaagccaaaccagtac

SEQ ID NO: 43451 - RNA, 21 nt, RNAi
cacaaagccaaaccaguacuu

SEQ ID NO: 43452 - RNA, 21 nt, RNAi
uuguguuucgguuuggucaug

SEQ ID NO: 43453 - DNA, 21 bp, homo sapiens
tacaaacctacctacgtggtg

SEQ ID NO: 43454 - RNA, 21 nt, RNAi
caaaccuaccuacgugguguu

SEQ ID NO: 43455 - RNA, 21 nt, RNAi
uuguuuggauggaugcaccac

SEQ ID NO: 43456 - DNA, 21 bp, homo sapiens
tacctacgtggtgtactactc

SEQ ID NO: 43457 - RNA, 21 nt, RNAi
ccuacgugguguacuacucuu

SEQ ID NO: 43458 - RNA, 21 nt, RNAi
uuggaugcaccacaugaugag

SEQ ID NO: 43459 - DNA, 21 bp, homo sapiens
tacgccttcacgtcctcctcc

SEQ ID NO: 43460 - RNA, 21 nt, RNAi
cgccuucacguccuccuccuu

SEQ ID NO: 43461 - RNA, 21 nt, RNAi
uugcggaagugcaggaggagg

SEQ ID NO: 43462 - DNA, 21 bp, homo sapiens
tacctccgacaagaggagatc

SEQ ID NO: 43463 - RNA, 21 nt, RNAi
ccuccgacaagaggagaucuu

SEQ ID NO: 43464 - RNA, 21 nt, RNAi
uuggaggcuguucuccucuag

SEQ ID NO: 43465 - DNA, 21 bp, homo sapiens
tattaccgaaatgaagaaagc

SEQ ID NO: 43466 - RNA, 21 nt, RNAi
uuaccgaaaugaagaaagcuu

SEQ ID NO: 43467 - RNA, 21 nt, RNAi
uuaauggcuuuacuucuuucg

SEQ ID NO: 43468 - DNA, 21 bp, homo sapiens
taccgaaatgaagaaagcttg

SEQ ID NO: 43469 - RNA, 21 nt, RNAi
ccgaaaugaagaaagcuuguu

SEQ ID NO: 43470 - RNA, 21 nt, RNAi
uuggcuuuacuucuuucgaac

SEQ ID NO: 43471 - DNA, 21 bp, homo sapiens
aaagcgtgcaagtatcagtga

SEQ ID NO: 43472 - RNA, 21 nt, RNAi
agcgugcaaguaucagugauu

SEQ ID NO: 43473 - RNA, 21 nt, RNAi
uuucgcacguucauagucacu

SEQ ID NO: 43474 - DNA, 21 bp, homo sapiens
aagcgtgcaagtatcagtgat

SEQ ID NO: 43475 - RNA, 21 nt, RNAi
gcgugcaaguaucagugauuu

SEQ ID NO: 43476 - RNA, 21 nt, RNAi
uucgcacguucauagucacua

SEQ ID NO: 43477 - DNA, 21 bp, homo sapiens
aaatgtgacagtcagcttcag

SEQ ID NO: 43478 - RNA, 21 nt, RNAi
augugacagucagcuucaguu

SEQ ID NO: 43479 - RNA, 21 nt, RNAi
uuuacacugucagucgaaguc

SEQ ID NO: 43480 - DNA, 21 bp, homo sapiens
aatgtgacagtcagcttcaga

SEQ ID NO: 43481 - RNA, 21 nt, RNAi
ugugacagucagcuucagauu

SEQ ID NO: 43482 - RNA, 21 nt, RNAi
uuacacugucagucgaagucu

SEQ ID NO: 43483 - DNA, 21 bp, homo sapiens
aatgcagtctggattcgaatt

SEQ ID NO: 43484 - RNA, 21 nt, RNAi
ugcagucuggauucgaauuuu

SEQ ID NO: 43485 - RNA, 21 nt, RNAi
uuacgucagaccuaagcuuaa

SEQ ID NO: 43486 - DNA, 21 bp, homo sapiens
aacacagtacacaaagccaaa

SEQ ID NO: 43487 - RNA, 21 nt, RNAi
cacaguacacaaagccaaauu

SEQ ID NO: 43488 - RNA, 21 nt, RNAi
uugugucauguguuucgguuu

SEQ ID NO: 43489 - DNA, 21 bp, homo sapiens
aaaccagtacaaacctaccta

SEQ ID NO: 43490 - RNA, 21 nt, RNAi
accaguacaaaccuaccuauu

SEQ ID NO: 43491 - RNA, 21 nt, RNAi
uuuggucauguuuggauggau

SEQ ID NO: 43492 - DNA, 21 bp, homo sapiens
aaccagtacaaacctacctac

SEQ ID NO: 43493 - RNA, 21 nt, RNAi
ccaguacaaaccuaccuacuu

SEQ ID NO: 43494 - RNA, 21 nt, RNAi
uuggucauguuuggauggaug

SEQ ID NO: 43495 - DNA, 21 bp, homo sapiens
aaacctacctacgtggtgtac

SEQ ID NO: 43496 - RNA, 21 nt, RNAi
accuaccuacgugguguacuu

SEQ ID NO: 43497 - RNA, 21 nt, RNAi
uuuggauggaugcaccacaug

SEQ ID NO: 43498 - DNA, 21 bp, homo sapiens
aacctacctacgtggtgtact

SEQ ID NO: 43499 - RNA, 21 nt, RNAi
ccuaccuacgugguguacuuu

SEQ ID NO: 43500 - RNA, 21 nt, RNAi
uuggauggaugcaccacauga

SEQ ID NO: 43501 - DNA, 21 bp, homo sapiens
cacttgatccatctgtgtgag

SEQ ID NO: 43502 - RNA, 21 nt, RNAi
cuugauccaucugugugaguu

SEQ ID NO: 43503 - RNA, 21 nt, RNAi
uugaacuagguagacacacuc

SEQ ID NO: 43504 - DNA, 21 bp, homo sapiens
cagatgagtaaaggaccaggt

SEQ ID NO: 43505 - RNA, 21 nt, RNAi
gaugaguaaaggaccagguuu

SEQ ID NO: 43506 - RNA, 21 nt, RNAi
uucuacucauuuccuggucca

SEQ ID NO: 43507 - DNA, 21 bp, homo sapiens
caaaccagtacaaacctacct

SEQ ID NO: 43508 - RNA, 21 nt, RNAi
aaccaguacaaaccuaccuuu

SEQ ID NO: 43509 - RNA, 21 nt, RNAi
uuuuggucauguuuggaugga

SEQ ID NO: 43510 - DNA, 21 bp, homo sapiens
cagtacaaacctacctacgtg

SEQ ID NO: 43511 - RNA, 21 nt, RNAi
guacaaaccuaccuacguguu

SEQ ID NO: 43512 - RNA, 21 nt, RNAi
uucauguuuggauggaugcac

SEQ ID NO: 43513 - DNA, 21 bp, homo sapiens
caaacctacctacgtggtgta

SEQ ID NO: 43514 - RNA, 21 nt, RNAi
aaccuaccuacgugguguauu

SEQ ID NO: 43515 - RNA, 21 nt, RNAi
uuuuggauggaugcaccacau

SEQ ID NO: 43516 - DNA, 21 bp, homo sapiens
gagaaaggaatctgtagttca

SEQ ID NO: 43517 - RNA, 21 nt, RNAi
gaaaggaaucuguaguucauu

SEQ ID NO: 43518 - RNA, 21 nt, RNAi
uucuuuccuuagacaucaagu

SEQ ID NO: 43519 - DNA, 21 bp, homo sapiens
gatgagtaaaggaccaggtga

SEQ ID NO: 43520 - RNA, 21 nt, RNAi
ugaguaaaggaccaggugauu

SEQ ID NO: 43521 - RNA, 21 nt, RNAi
uuacucauuuccugguccacu

SEQ ID NO: 43522 - DNA, 21 bp, homo sapiens
gaacacagtacacaaagccaa

SEQ ID NO: 43523 - RNA, 21 nt, RNAi
acacaguacacaaagccaauu

SEQ ID NO: 43524 - RNA, 21 nt, RNAi
uuugugucauguguuucgguu

SEQ ID NO: 43525 - DNA, 21 bp, homo sapiens
tacaaacctacctacgtggtg

SEQ ID NO: 43526 - RNA, 21 nt, RNAi
caaaccuaccuacgugguguu

SEQ ID NO: 43527 - RNA, 21 nt, RNAi
uuguuuggauggaugcaccac

SEQ ID NO: 43528 - DNA, 21 bp, homo sapiens
aagcttctgcgctggtgctta

SEQ ID NO: 43529 - RNA, 21 nt, RNAi
gcuucugcgcuggugcuuauu

SEQ ID NO: 43530 - RNA, 21 nt, RNAi
uucgaagacgcgaccacgaau

SEQ ID NO: 43531 - DNA, 21 bp, homo sapiens
aaccgactttcctccggactc

SEQ ID NO: 43532 - RNA, 21 nt, RNAi
ccgacuuuccuccggacucuu

SEQ ID NO: 43533 - RNA, 21 nt, RNAi
uuggcugaaaggaggccugag

SEQ ID NO: 43534 - DNA, 21 bp, homo sapiens
aaggagaaggcagctctgttt

SEQ ID NO: 43535 - RNA, 21 nt, RNAi
ggagaaggcagcucuguuuuu

SEQ ID NO: 43536 - RNA, 21 nt, RNAi
uuccucuuccgucgagacaaa

SEQ ID NO: 43537 - DNA, 21 bp, homo sapiens
aaggcagctctgtttctctgc

SEQ ID NO: 43538 - RNA, 21 nt, RNAi
ggcagcucuguuucucugcuu

SEQ ID NO: 43539 - RNA, 21 nt, RNAi
uuccgucgagacaaagagacg

SEQ ID NO: 43540 - DNA, 21 bp, homo sapiens
aagcatgtgttgaacctctac

SEQ ID NO: 43541 - RNA, 21 nt, RNAi
gcauguguugaaccucuacuu

SEQ ID NO: 43542 - RNA, 21 nt, RNAi
uucguacacaacuuggagaug

SEQ ID NO: 43543 - DNA, 21 bp, homo sapiens
aacctctacctgttaggtgtg

SEQ ID NO: 43544 - RNA, 21 nt, RNAi
ccucuaccuguuagguguguu

SEQ ID NO: 43545 - RNA, 21 nt, RNAi
uuggagauggacaauccacac

SEQ ID NO: 43546 - DNA, 21 bp, homo sapiens
aagccaactagccaacacaga

SEQ ID NO: 43547 - RNA, 21 nt, RNAi
gccaacuagccaacacagauu

SEQ ID NO: 43548 - RNA, 21 nt, RNAi
uucgguugaucgguugugucu

SEQ ID NO: 43549 - DNA, 21 bp, homo sapiens
aagcatgtgataagacctcct

SEQ ID NO: 43550 - RNA, 21 nt, RNAi
gcaugugauaagaccuccuuu

SEQ ID NO: 43551 - RNA, 21 nt, RNAi
uucguacacuauucuggagga

SEQ ID NO: 43552 - DNA, 21 bp, homo sapiens
aagacctccttccatactggc

SEQ ID NO: 43553 - RNA, 21 nt, RNAi
gaccuccuuccauacuggcuu

SEQ ID NO: 43554 - RNA, 21 nt, RNAi
uucuggaggaagguaugaccg

SEQ ID NO: 43555 - DNA, 21 bp, homo sapiens
aacactgacctagacatgtcc

SEQ ID NO: 43556 - RNA, 21 nt, RNAi
cacugaccuagacauguccuu

SEQ ID NO: 43557 - RNA, 21 nt, RNAi
uugugacuggaucuguacagg

SEQ ID NO: 43558 - DNA, 21 bp, homo sapiens
aagctgagcaccgttgtaacc

SEQ ID NO: 43559 - RNA, 21 nt, RNAi
gcugagcaccguuguaaccuu

SEQ ID NO: 43560 - RNA, 21 nt, RNAi
uucgacucguggcaacauugg

SEQ ID NO: 43561 - DNA, 21 bp, homo sapiens
aaccagagaactattactagg

SEQ ID NO: 43562 - RNA, 21 nt, RNAi
ccagagaacuauuacuagguu

SEQ ID NO: 43563 - RNA, 21 nt, RNAi
uuggucucuugauaaugaucc

SEQ ID NO: 43564 - DNA, 21 bp, homo sapiens
aactattactaggccttgaag

SEQ ID NO: 43565 - RNA, 21 nt, RNAi
cuauuacuaggccuugaaguu

SEQ ID NO: 43566 - RNA, 21 nt, RNAi
uugauaaugauccggaacuuc

SEQ ID NO: 43567 - DNA, 21 bp, homo sapiens
aagaacctgtctaactggatg

SEQ ID NO: 43568 - RNA, 21 nt, RNAi
gaaccugucuaacuggauguu

SEQ ID NO: 43569 - RNA, 21 nt, RNAi
uucuuggacagauugaccuac

SEQ ID NO: 43570 - DNA, 21 bp, homo sapiens
aacctgtctaactggatgctc

SEQ ID NO: 43571 - RNA, 21 nt, RNAi
ccugucuaacuggaugcucuu

SEQ ID NO: 43572 - RNA, 21 nt, RNAi
uuggacagauugaccuacgag

SEQ ID NO: 43573 - DNA, 21 bp, homo sapiens
aactggatgctcattgcctgg

SEQ ID NO: 43574 - RNA, 21 nt, RNAi
cuggaugcucauugccugguu

SEQ ID NO: 43575 - RNA, 21 nt, RNAi
uugaccuacgaguaacggacc

SEQ ID NO: 43576 - DNA, 21 bp, homo sapiens
aaggcctgtttaggccggttg

SEQ ID NO: 43577 - RNA, 21 nt, RNAi
ggccuguuuaggccgguuguu

SEQ ID NO: 43578 - RNA, 21 nt, RNAi
uuccggacaaauccggccaac

SEQ ID NO: 43579 - DNA, 21 bp, homo sapiens
aaccgagatcgcactgctgta

SEQ ID NO: 43580 - RNA, 21 nt, RNAi
ccgagaucgcacugcuguauu

SEQ ID NO: 43581 - RNA, 21 nt, RNAi
uuggcucuagcgugacgacau

SEQ ID NO: 43582 - DNA, 21 bp, homo sapiens
aaagcctgtttaatgcacagg

SEQ ID NO: 43583 - RNA, 21 nt, RNAi
agccuguuuaaugcacagguu

SEQ ID NO: 43584 - RNA, 21 nt, RNAi
uuucggacaaauuacgugucc

SEQ ID NO: 43585 - DNA, 21 bp, homo sapiens
aagcctgtttaatgcacaggt

SEQ ID NO: 43586 - RNA, 21 nt, RNAi
gccuguuuaaugcacagguuu

SEQ ID NO: 43587 - RNA, 21 nt, RNAi
uucggacaaauuacgugucca

SEQ ID NO: 43588 - DNA, 21 bp, homo sapiens
aatgcacaggtgtgagtggat

SEQ ID NO: 43589 - RNA, 21 nt, RNAi
ugcacaggugugaguggauuu

SEQ ID NO: 43590 - RNA, 21 nt, RNAi
uuacguguccacacucaccua

SEQ ID NO: 43591 - DNA, 21 bp, homo sapiens
aattatttggtgttgagcctc

SEQ ID NO: 43592 - RNA, 21 nt, RNAi
uuauuugguguugagccucuu

SEQ ID NO: 43593 - RNA, 21 nt, RNAi
uuaauaaaccacaacucggag

SEQ ID NO: 43594 - DNA, 21 bp, homo sapiens
aagagctcctccatgtttgga

SEQ ID NO: 43595 - RNA, 21 nt, RNAi
gagcuccuccauguuuggauu

SEQ ID NO: 43596 - RNA, 21 nt, RNAi
uucucgaggagguacaaaccu

SEQ ID NO: 43597 - DNA, 21 bp, homo sapiens
aaagtcgttcctccaacatag

SEQ ID NO: 43598 - RNA, 21 nt, RNAi
agucguuccuccaacauaguu

SEQ ID NO: 43599 - RNA, 21 nt, RNAi
uuucagcaaggagguuguauc

SEQ ID NO: 43600 - DNA, 21 bp, homo sapiens
aagtcgttcctccaacatagt

SEQ ID NO: 43601 - RNA, 21 nt, RNAi
gucguuccuccaacauaguuu

SEQ ID NO: 43602 - RNA, 21 nt, RNAi
uucagcaaggagguuguauca

SEQ ID NO: 43603 - DNA, 21 bp, homo sapiens
aacatagtgtgtattggtctg

SEQ ID NO: 43604 - RNA, 21 nt, RNAi
cauaguguguauuggucuguu

SEQ ID NO: 43605 - RNA, 21 nt, RNAi
uuguaucacacauaaccagac

SEQ ID NO: 43606 - DNA, 21 bp, homo sapiens
aaagcctgctcaagttatgga

SEQ ID NO: 43607 - RNA, 21 nt, RNAi
agccugcucaaguuauggauu

SEQ ID NO: 43608 - RNA, 21 nt, RNAi
uuucggacgaguucaauaccu

SEQ ID NO: 43609 - DNA, 21 bp, homo sapiens
aagcctgctcaagttatggac

SEQ ID NO: 43610 - RNA, 21 nt, RNAi
gccugcucaaguuauggacuu

SEQ ID NO: 43611 - RNA, 21 nt, RNAi
uucggacgaguucaauaccug

SEQ ID NO: 43612 - DNA, 21 bp, homo sapiens
aagttatggacattgtggcca

SEQ ID NO: 43613 - RNA, 21 nt, RNAi
guuauggacauuguggccauu

SEQ ID NO: 43614 - RNA, 21 nt, RNAi
uucaauaccuguaacaccggu

SEQ ID NO: 43615 - DNA, 21 bp, homo sapiens
cagaggcctttcagaaggaga

SEQ ID NO: 43616 - RNA, 21 nt, RNAi
gaggccuuucagaaggagauu

SEQ ID NO: 43617 - RNA, 21 nt, RNAi
uucuccggaaagucuuccucu

SEQ ID NO: 43618 - DNA, 21 bp, homo sapiens
cagaaggagaaggcagctctg

SEQ ID NO: 43619 - RNA, 21 nt, RNAi
gaaggagaaggcagcucuguu

SEQ ID NO: 43620 - RNA, 21 nt, RNAi
uucuuccucuuccgucgagac

SEQ ID NO: 43621 - DNA, 21 bp, homo sapiens
cagctctgtttctctgcagag

SEQ ID NO: 43622 - RNA, 21 nt, RNAi
gcucuguuucucugcagaguu

SEQ ID NO: 43623 - RNA, 21 nt, RNAi
uucgagacaaagagacgucuc

SEQ ID NO: 43624 - DNA, 21 bp, homo sapiens
cagccatgaagcatgtgttga

SEQ ID NO: 43625 - RNA, 21 nt, RNAi
gccaugaagcauguguugauu

SEQ ID NO: 43626 - RNA, 21 nt, RNAi
uucgguacuucguacacaacu

SEQ ID NO: 43627 - DNA, 21 bp, homo sapiens
catgaagcatgtgttgaacct

SEQ ID NO: 43628 - RNA, 21 nt, RNAi
ugaagcauguguugaaccuuu

SEQ ID NO: 43629 - RNA, 21 nt, RNAi
uuacuucguacacaacuugga

SEQ ID NO: 43630 - DNA, 21 bp, homo sapiens
catgtgttgaacctctacctg

SEQ ID NO: 43631 - RNA, 21 nt, RNAi
uguguugaaccucuaccuguu

SEQ ID NO: 43632 - RNA, 21 nt, RNAi
uuacacaacuuggagauggac

SEQ ID NO: 43633 - DNA, 21 bp, homo sapiens
catcttcgttagagtgatgga

SEQ ID NO: 43634 - RNA, 21 nt, RNAi
ucuucguuagagugauggauu

SEQ ID NO: 43635 - RNA, 21 nt, RNAi
uuagaagcaaucucacuaccu

SEQ ID NO: 43636 - DNA, 21 bp, homo sapiens
caccagaagccaactagccaa

SEQ ID NO: 43637 - RNA, 21 nt, RNAi
ccagaagccaacuagccaauu

SEQ ID NO: 43638 - RNA, 21 nt, RNAi
uuggucuucgguugaucgguu

SEQ ID NO: 43639 - DNA, 21 bp, homo sapiens
cagaagccaactagccaacac

SEQ ID NO: 43640 - RNA, 21 nt, RNAi
gaagccaacuagccaacacuu

SEQ ID NO: 43641 - RNA, 21 nt, RNAi
uucuucgguugaucgguugug

SEQ ID NO: 43642 - DNA, 21 bp, homo sapiens
cagaccatccatccagaagca

SEQ ID NO: 43643 - RNA, 21 nt, RNAi
gaccauccauccagaagcauu

SEQ ID NO: 43644 - RNA, 21 nt, RNAi
uucugguagguaggucuucgu

SEQ ID NO: 43645 - DNA, 21 bp, homo sapiens
catccatccagaagcatgtga

SEQ ID NO: 43646 - RNA, 21 nt, RNAi
uccauccagaagcaugugauu

SEQ ID NO: 43647 - RNA, 21 nt, RNAi
uuagguaggucuucguacacu

SEQ ID NO: 43648 - DNA, 21 bp, homo sapiens
catccagaagcatgtgataag

SEQ ID NO: 43649 - RNA, 21 nt, RNAi
uccagaagcaugugauaaguu

SEQ ID NO: 43650 - RNA, 21 nt, RNAi
uuaggucuucguacacuauuc

SEQ ID NO: 43651 - DNA, 21 bp, homo sapiens
cagaagcatgtgataagacct

SEQ ID NO: 43652 - RNA, 21 nt, RNAi
gaagcaugugauaagaccuuu

SEQ ID NO: 43653 - RNA, 21 nt, RNAi
uucuucguacacuauucugga

SEQ ID NO: 43654 - DNA, 21 bp, homo sapiens
catgtgataagacctccttcc

SEQ ID NO: 43655 - RNA, 21 nt, RNAi
ugugauaagaccuccuuccuu

SEQ ID NO: 43656 - RNA, 21 nt, RNAi
uuacacuauucuggaggaagg

SEQ ID NO: 43657 - DNA, 21 bp, homo sapiens
cactgacctagacatgtccag

SEQ ID NO: 43658 - RNA, 21 nt, RNAi
cugaccuagacauguccaguu

SEQ ID NO: 43659 - RNA, 21 nt, RNAi
uugacuggaucuguacagguc

SEQ ID NO: 43660 - DNA, 21 bp, homo sapiens
cattcctagcagacaagctga

SEQ ID NO: 43661 - RNA, 21 nt, RNAi
uuccuagcagacaagcugauu

SEQ ID NO: 43662 - RNA, 21 nt, RNAi
uuaaggaucgucuguucgacu

SEQ ID NO: 43663 - DNA, 21 bp, homo sapiens
cagacaagctgagcaccgttg

SEQ ID NO: 43664 - RNA, 21 nt, RNAi
gacaagcugagcaccguuguu

SEQ ID NO: 43665 - RNA, 21 nt, RNAi
uucuguucgacucguggcaac

SEQ ID NO: 43666 - DNA, 21 bp, homo sapiens
caagctgagcaccgttgtaac

SEQ ID NO: 43667 - RNA, 21 nt, RNAi
agcugagcaccguuguaacuu

SEQ ID NO: 43668 - RNA, 21 nt, RNAi
uuucgacucguggcaacauug

SEQ ID NO: 43669 - DNA, 21 bp, homo sapiens
caccgttgtaaccagagaact

SEQ ID NO: 43670 - RNA, 21 nt, RNAi
ccguuguaaccagagaacuuu

SEQ ID NO: 43671 - RNA, 21 nt, RNAi
uuggcaacauuggucucuuga

SEQ ID NO: 43672 - DNA, 21 bp, homo sapiens
cagagaactattactaggcct

SEQ ID NO: 43673 - RNA, 21 nt, RNAi
gagaacuauuacuaggccuuu

SEQ ID NO: 43674 - RNA, 21 nt, RNAi
uucucuugauaaugauccgga

SEQ ID NO: 43675 - DNA, 21 bp, homo sapiens
caaggcctgtttaggccggtt

SEQ ID NO: 43676 - RNA, 21 nt, RNAi
aggccuguuuaggccgguuuu

SEQ ID NO: 43677 - RNA, 21 nt, RNAi
uuuccggacaaauccggccaa

SEQ ID NO: 43678 - DNA, 21 bp, homo sapiens
catgcctgtaatcctagcact

SEQ ID NO: 43679 - RNA, 21 nt, RNAi
ugccuguaauccuagcacuuu

SEQ ID NO: 43680 - RNA, 21 nt, RNAi
uuacggacauuaggaucguga

SEQ ID NO: 43681 - DNA, 21 bp, homo sapiens
cacctgaggtcaggagttcga

SEQ ID NO: 43682 - RNA, 21 nt, RNAi
ccugaggucaggaguucgauu

SEQ ID NO: 43683 - RNA, 21 nt, RNAi
uuggacuccaguccucaagcu

SEQ ID NO: 43684 - DNA, 21 bp, homo sapiens
caggagttcgagaccagcctc

SEQ ID NO: 43685 - RNA, 21 nt, RNAi
ggaguucgagaccagccucuu

SEQ ID NO: 43686 - RNA, 21 nt, RNAi
uuccucaagcucuggucggag

SEQ ID NO: 43687 - DNA, 21 bp, homo sapiens
cagcctcgccaacatggcgaa

SEQ ID NO: 43688 - RNA, 21 nt, RNAi
gccucgccaacauggcgaauu

SEQ ID NO: 43689 - RNA, 21 nt, RNAi
uucggagcgguuguaccgcuu

SEQ ID NO: 43690 - DNA, 21 bp, homo sapiens
cagtgaaccgagatcgcactg

SEQ ID NO: 43691 - RNA, 21 nt, RNAi
gugaaccgagaucgcacuguu

SEQ ID NO: 43692 - RNA, 21 nt, RNAi
uucacuuggcucuagcgugac

SEQ ID NO: 43693 - DNA, 21 bp, homo sapiens
cacagtgcaagactccatctc

SEQ ID NO: 43694 - RNA, 21 nt, RNAi
cagugcaagacuccaucucuu

SEQ ID NO: 43695 - RNA, 21 nt, RNAi
uugucacguucugagguagag

SEQ ID NO: 43696 - DNA, 21 bp, homo sapiens
cagtgcaagactccatctcaa

SEQ ID NO: 43697 - RNA, 21 nt, RNAi
gugcaagacuccaucucaauu

SEQ ID NO: 43698 - RNA, 21 nt, RNAi
uucacguucugagguagaguu

SEQ ID NO: 43699 - DNA, 21 bp, homo sapiens
cacaggtgtgagtggattgct

SEQ ID NO: 43700 - RNA, 21 nt, RNAi
caggugugaguggauugcuuu

SEQ ID NO: 43701 - RNA, 21 nt, RNAi
uuguccacacucaccuaacga

SEQ ID NO: 43702 - DNA, 21 bp, homo sapiens
caggtgtgagtggattgctta

SEQ ID NO: 43703 - RNA, 21 nt, RNAi
ggugugaguggauugcuuauu

SEQ ID NO: 43704 - RNA, 21 nt, RNAi
uuccacacucaccuaacgaau

SEQ ID NO: 43705 - DNA, 21 bp, homo sapiens
cagcagtatggctctgacatc

SEQ ID NO: 43706 - RNA, 21 nt, RNAi
gcaguauggcucugacaucuu

SEQ ID NO: 43707 - RNA, 21 nt, RNAi
uucgucauaccgagacuguag

SEQ ID NO: 43708 - DNA, 21 bp, homo sapiens
cagtatggctctgacatctct

SEQ ID NO: 43709 - RNA, 21 nt, RNAi
guauggcucugacaucucuuu

SEQ ID NO: 43710 - RNA, 21 nt, RNAi
uucauaccgagacuguagaga

SEQ ID NO: 43711 - DNA, 21 bp, homo sapiens
caattatttggtgttgagcct

SEQ ID NO: 43712 - RNA, 21 nt, RNAi
auuauuugguguugagccuuu

SEQ ID NO: 43713 - RNA, 21 nt, RNAi
uuuaauaaaccacaacucgga

SEQ ID NO: 43714 - DNA, 21 bp, homo sapiens
cacaagagctcctccatgttt

SEQ ID NO: 43715 - RNA, 21 nt, RNAi
caagagcuccuccauguuuuu

SEQ ID NO: 43716 - RNA, 21 nt, RNAi
uuguucucgaggagguacaaa

SEQ ID NO: 43717 - DNA, 21 bp, homo sapiens
caagagctcctccatgtttgg

SEQ ID NO: 43718 - RNA, 21 nt, RNAi
agagcuccuccauguuugguu

SEQ ID NO: 43719 - RNA, 21 nt, RNAi
uuucucgaggagguacaaacc

SEQ ID NO: 43720 - DNA, 21 bp, homo sapiens
catgtttggatagcagttgaa

SEQ ID NO: 43721 - RNA, 21 nt, RNAi
uguuuggauagcaguugaauu

SEQ ID NO: 43722 - RNA, 21 nt, RNAi
uuacaaaccuaucgucaacuu

SEQ ID NO: 43723 - DNA, 21 bp, homo sapiens
caacatagtgtgtattggtct

SEQ ID NO: 43724 - RNA, 21 nt, RNAi
acauaguguguauuggucuuu

SEQ ID NO: 43725 - RNA, 21 nt, RNAi
uuuguaucacacauaaccaga

SEQ ID NO: 43726 - DNA, 21 bp, homo sapiens
catagtgtgtattggtctgaa

SEQ ID NO: 43727 - RNA, 21 nt, RNAi
uaguguguauuggucugaauu

SEQ ID NO: 43728 - RNA, 21 nt, RNAi
uuaucacacauaaccagacuu

SEQ ID NO: 43729 - DNA, 21 bp, homo sapiens
caaagcctgctcaagttatgg

SEQ ID NO: 43730 - RNA, 21 nt, RNAi
aagccugcucaaguuaugguu

SEQ ID NO: 43731 - RNA, 21 nt, RNAi
uuuucggacgaguucaauacc

SEQ ID NO: 43732 - DNA, 21 bp, homo sapiens
caagttatggacattgtggcc

SEQ ID NO: 43733 - RNA, 21 nt, RNAi
aguuauggacauuguggccuu

SEQ ID NO: 43734 - RNA, 21 nt, RNAi
uuucaauaccuguaacaccgg

SEQ ID NO: 43735 - DNA, 21 bp, homo sapiens
cattgtggccaccatgtggct

SEQ ID NO: 43736 - RNA, 21 nt, RNAi
uuguggccaccauguggcuuu

SEQ ID NO: 43737 - RNA, 21 nt, RNAi
uuaacaccggugguacaccga

SEQ ID NO: 43738 - DNA, 21 bp, homo sapiens
caccatgtggcttaaatgatt

SEQ ID NO: 43739 - RNA, 21 nt, RNAi
ccauguggcuuaaaugauuuu

SEQ ID NO: 43740 - RNA, 21 nt, RNAi
uugguacaccgaauuuacuaa

SEQ ID NO: 43741 - DNA, 21 bp, homo sapiens
gaagcttctgcgctggtgctt

SEQ ID NO: 43742 - RNA, 21 nt, RNAi
agcuucugcgcuggugcuuuu

SEQ ID NO: 43743 - RNA, 21 nt, RNAi
uuucgaagacgcgaccacgaa

SEQ ID NO: 43744 - DNA, 21 bp, homo sapiens
gactttcctccggactcctgc

SEQ ID NO: 43745 - RNA, 21 nt, RNAi
cuuuccuccggacuccugcuu

SEQ ID NO: 43746 - RNA, 21 nt, RNAi
uugaaaggaggccugaggacg

SEQ ID NO: 43747 - DNA, 21 bp, homo sapiens
gaggcctttcagaaggagaag

SEQ ID NO: 43748 - RNA, 21 nt, RNAi
ggccuuucagaaggagaaguu

SEQ ID NO: 43749 - RNA, 21 nt, RNAi
uuccggaaagucuuccucuuc

SEQ ID NO: 43750 - DNA, 21 bp, homo sapiens
gaaggagaaggcagctctgtt

SEQ ID NO: 43751 - RNA, 21 nt, RNAi
aggagaaggcagcucuguuuu

SEQ ID NO: 43752 - RNA, 21 nt, RNAi
uuuccucuuccgucgagacaa

SEQ ID NO: 43753 - DNA, 21 bp, homo sapiens
gagaaggcagctctgtttctc

SEQ ID NO: 43754 - RNA, 21 nt, RNAi
gaaggcagcucuguuucucuu

SEQ ID NO: 43755 - RNA, 21 nt, RNAi
uucuuccgucgagacaaagag

SEQ ID NO: 43756 - DNA, 21 bp, homo sapiens
gaaggcagctctgtttctctg

SEQ ID NO: 43757 - RNA, 21 nt, RNAi
aggcagcucuguuucucuguu

SEQ ID NO: 43758 - RNA, 21 nt, RNAi
uuuccgucgagacaaagagac

SEQ ID NO: 43759 - DNA, 21 bp, homo sapiens
gaagcatgtgttgaacctcta

SEQ ID NO: 43760 - RNA, 21 nt, RNAi
agcauguguugaaccucuauu

SEQ ID NO: 43761 - RNA, 21 nt, RNAi
uuucguacacaacuuggagau

SEQ ID NO: 43762 - DNA, 21 bp, homo sapiens
gaacctctacctgttaggtgt

SEQ ID NO: 43763 - RNA, 21 nt, RNAi
accucuaccuguuagguguuu

SEQ ID NO: 43764 - RNA, 21 nt, RNAi
uuuggagauggacaauccaca

SEQ ID NO: 43765 - DNA, 21 bp, homo sapiens
gacctcctggaccaccagaag

SEQ ID NO: 43766 - RNA, 21 nt, RNAi
ccuccuggaccaccagaaguu

SEQ ID NO: 43767 - RNA, 21 nt, RNAi
uuggaggaccugguggucuuc

SEQ ID NO: 43768 - DNA, 21 bp, homo sapiens
gaccaccagaagccaactagc

SEQ ID NO: 43769 - RNA, 21 nt, RNAi
ccaccagaagccaacuagcuu

SEQ ID NO: 43770 - RNA, 21 nt, RNAi
uugguggucuucgguugaucg

SEQ ID NO: 43771 - DNA, 21 bp, homo sapiens
gaagccaactagccaacacag

SEQ ID NO: 43772 - RNA, 21 nt, RNAi
agccaacuagccaacacaguu

SEQ ID NO: 43773 - RNA, 21 nt, RNAi
uuucgguugaucgguuguguc

SEQ ID NO: 43774 - DNA, 21 bp, homo sapiens
gaccatccatccagaagcatg

SEQ ID NO: 43775 - RNA, 21 nt, RNAi
ccauccauccagaagcauguu

SEQ ID NO: 43776 - RNA, 21 nt, RNAi
uugguagguaggucuucguac

SEQ ID NO: 43777 - DNA, 21 bp, homo sapiens
gaagcatgtgataagacctcc

SEQ ID NO: 43778 - RNA, 21 nt, RNAi
agcaugugauaagaccuccuu

SEQ ID NO: 43779 - RNA, 21 nt, RNAi
uuucguacacuauucuggagg

SEQ ID NO: 43780 - DNA, 21 bp, homo sapiens
gataagacctccttccatact

SEQ ID NO: 43781 - RNA, 21 nt, RNAi
uaagaccuccuuccauacuuu

SEQ ID NO: 43782 - RNA, 21 nt, RNAi
uuauucuggaggaagguauga

SEQ ID NO: 43783 - DNA, 21 bp, homo sapiens
gacctccttccatactggcca

SEQ ID NO: 43784 - RNA, 21 nt, RNAi
ccuccuuccauacuggccauu

SEQ ID NO: 43785 - RNA, 21 nt, RNAi
uuggaggaagguaugaccggu

SEQ ID NO: 43786 - DNA, 21 bp, homo sapiens
gaacactgacctagacatgtc

SEQ ID NO: 43787 - RNA, 21 nt, RNAi
acacugaccuagacaugucuu

SEQ ID NO: 43788 - RNA, 21 nt, RNAi
uuugugacuggaucuguacag

SEQ ID NO: 43789 - DNA, 21 bp, homo sapiens
gacctagacatgtccagatgg

SEQ ID NO: 43790 - RNA, 21 nt, RNAi
ccuagacauguccagaugguu

SEQ ID NO: 43791 - RNA, 21 nt, RNAi
uuggaucuguacaggucuacc

SEQ ID NO: 43792 - DNA, 21 bp, homo sapiens
gacaagctgagcaccgttgta

SEQ ID NO: 43793 - RNA, 21 nt, RNAi
caagcugagcaccguuguauu

SEQ ID NO: 43794 - RNA, 21 nt, RNAi
uuguucgacucguggcaacau

SEQ ID NO: 43795 - DNA, 21 bp, homo sapiens
gagcaccgttgtaaccagaga

SEQ ID NO: 43796 - RNA, 21 nt, RNAi
gcaccguuguaaccagagauu

SEQ ID NO: 43797 - RNA, 21 nt, RNAi
uucguggcaacauuggucucu

SEQ ID NO: 43798 - DNA, 21 bp, homo sapiens
gagaactattactaggccttg

SEQ ID NO: 43799 - RNA, 21 nt, RNAi
gaacuauuacuaggccuuguu

SEQ ID NO: 43800 - RNA, 21 nt, RNAi
uucuugauaaugauccggaac

SEQ ID NO: 43801 - DNA, 21 bp, homo sapiens
gaactattactaggccttgaa

SEQ ID NO: 43802 - RNA, 21 nt, RNAi
acuauuacuaggccuugaauu

SEQ ID NO: 43803 - RNA, 21 nt, RNAi
uuugauaaugauccggaacuu

SEQ ID NO: 43804 - DNA, 21 bp, homo sapiens
gaagaacctgtctaactggat

SEQ ID NO: 43805 - RNA, 21 nt, RNAi
agaaccugucuaacuggauuu

SEQ ID NO: 43806 - RNA, 21 nt, RNAi
uuucuuggacagauugaccua

SEQ ID NO: 43807 - DNA, 21 bp, homo sapiens
gaacctgtctaactggatgct

SEQ ID NO: 43808 - RNA, 21 nt, RNAi
accugucuaacuggaugcuuu

SEQ ID NO: 43809 - RNA, 21 nt, RNAi
uuuggacagauugaccuacga

SEQ ID NO: 43810 - DNA, 21 bp, homo sapiens
gatcacctgaggtcaggagtt

SEQ ID NO: 43811 - RNA, 21 nt, RNAi
ucaccugaggucaggaguuuu

SEQ ID NO: 43812 - RNA, 21 nt, RNAi
uuaguggacuccaguccucaa

SEQ ID NO: 43813 - DNA, 21 bp, homo sapiens
gaggtcaggagttcgagacca

SEQ ID NO: 43814 - RNA, 21 nt, RNAi
ggucaggaguucgagaccauu

SEQ ID NO: 43815 - RNA, 21 nt, RNAi
uuccaguccucaagcucuggu

SEQ ID NO: 43816 - DNA, 21 bp, homo sapiens
gagaccagcctcgccaacatg

SEQ ID NO: 43817 - RNA, 21 nt, RNAi
gaccagccucgccaacauguu

SEQ ID NO: 43818 - RNA, 21 nt, RNAi
uucuggucggagcgguuguac

SEQ ID NO: 43819 - DNA, 21 bp, homo sapiens
gacggaggttgcagtgaaccg

SEQ ID NO: 43820 - RNA, 21 nt, RNAi
cggagguugcagugaaccguu

SEQ ID NO: 43821 - RNA, 21 nt, RNAi
uugccuccaacgucacuuggc

SEQ ID NO: 43822 - DNA, 21 bp, homo sapiens
gaggttgcagtgaaccgagat

SEQ ID NO: 43823 - RNA, 21 nt, RNAi
gguugcagugaaccgagauuu

SEQ ID NO: 43824 - RNA, 21 nt, RNAi
uuccaacgucacuuggcucua

SEQ ID NO: 43825 - DNA, 21 bp, homo sapiens
gaaccgagatcgcactgctgt

SEQ ID NO: 43826 - RNA, 21 nt, RNAi
accgagaucgcacugcuguuu

SEQ ID NO: 43827 - RNA, 21 nt, RNAi
uuuggcucuagcgugacgaca

SEQ ID NO: 43828 - DNA, 21 bp, homo sapiens
gagtggattgcttatggctat

SEQ ID NO: 43829 - RNA, 21 nt, RNAi
guggauugcuuauggcuauuu

SEQ ID NO: 43830 - RNA, 21 nt, RNAi
uucaccuaacgaauaccgaua

SEQ ID NO: 43831 - DNA, 21 bp, homo sapiens
gattgcttatggctatgagat

SEQ ID NO: 43832 - RNA, 21 nt, RNAi
uugcuuauggcuaugagauuu

SEQ ID NO: 43833 - RNA, 21 nt, RNAi
uuaacgaauaccgauacucua

SEQ ID NO: 43834 - DNA, 21 bp, homo sapiens
gagcctctcttccacaagagc

SEQ ID NO: 43835 - RNA, 21 nt, RNAi
gccucucuuccacaagagcuu

SEQ ID NO: 43836 - RNA, 21 nt, RNAi
uucggagagaagguguucucg

SEQ ID NO: 43837 - DNA, 21 bp, homo sapiens
gagctcctccatgtttggata

SEQ ID NO: 43838 - RNA, 21 nt, RNAi
gcuccuccauguuuggauauu

SEQ ID NO: 43839 - RNA, 21 nt, RNAi
uucgaggagguacaaaccuau

SEQ ID NO: 43840 - DNA, 21 bp, homo sapiens
gatagcagttgaagaggttgt

SEQ ID NO: 43841 - RNA, 21 nt, RNAi
uagcaguugaagagguuguuu

SEQ ID NO: 43842 - RNA, 21 nt, RNAi
uuaucgucaacuucuccaaca

SEQ ID NO: 43843 - DNA, 21 bp, homo sapiens
gagtgaggatggagtgttcag

SEQ ID NO: 43844 - RNA, 21 nt, RNAi
gugaggauggaguguucaguu

SEQ ID NO: 43845 - RNA, 21 nt, RNAi
uucacuccuaccucacaaguc

SEQ ID NO: 43846 - DNA, 21 bp, homo sapiens
gaggatggagtgttcagtgcc

SEQ ID NO: 43847 - RNA, 21 nt, RNAi
ggauggaguguucagugccuu

SEQ ID NO: 43848 - RNA, 21 nt, RNAi
uuccuaccucacaagucacgg

SEQ ID NO: 43849 - DNA, 21 bp, homo sapiens
gatgccaaagcctgctcaagt

SEQ ID NO: 43850 - RNA, 21 nt, RNAi
ugccaaagccugcucaaguuu

SEQ ID NO: 43851 - RNA, 21 nt, RNAi
uuacgguuucggacgaguuca

SEQ ID NO: 43852 - DNA, 21 bp, homo sapiens
gacattgtggccaccatgtgg

SEQ ID NO: 43853 - RNA, 21 nt, RNAi
cauuguggccaccaugugguu

SEQ ID NO: 43854 - RNA, 21 nt, RNAi
uuguaacaccggugguacacc

SEQ ID NO: 43855 - DNA, 21 bp, homo sapiens
tagtaaccgactttcctccgg

SEQ ID NO: 43856 - RNA, 21 nt, RNAi
guaaccgacuuuccuccgguu

SEQ ID NO: 43857 - RNA, 21 nt, RNAi
uucauuggcugaaaggaggcc

SEQ ID NO: 43858 - DNA, 21 bp, homo sapiens
taaccgactttcctccggact

SEQ ID NO: 43859 - RNA, 21 nt, RNAi
accgacuuuccuccggacuuu

SEQ ID NO: 43860 - RNA, 21 nt, RNAi
uuuggcugaaaggaggccuga

SEQ ID NO: 43861 - DNA, 21 bp, homo sapiens
tacctgttaggtgtggtactg

SEQ ID NO: 43862 - RNA, 21 nt, RNAi
ccuguuaggugugguacuguu

SEQ ID NO: 43863 - RNA, 21 nt, RNAi
uuggacaauccacaccaugac

SEQ ID NO: 43864 - DNA, 21 bp, homo sapiens
tactctccatcttcgttagag

SEQ ID NO: 43865 - RNA, 21 nt, RNAi
cucuccaucuucguuagaguu

SEQ ID NO: 43866 - RNA, 21 nt, RNAi
uugagagguagaagcaaucuc

SEQ ID NO: 43867 - DNA, 21 bp, homo sapiens
tagaaggcttactagagagcc

SEQ ID NO: 43868 - RNA, 21 nt, RNAi
gaaggcuuacuagagagccuu

SEQ ID NO: 43869 - RNA, 21 nt, RNAi
uucuuccgaaugaucucucgg

SEQ ID NO: 43870 - DNA, 21 bp, homo sapiens
taagacctccttccatactgg

SEQ ID NO: 43871 - RNA, 21 nt, RNAi
agaccuccuuccauacugguu

SEQ ID NO: 43872 - RNA, 21 nt, RNAi
uuucuggaggaagguaugacc

SEQ ID NO: 43873 - DNA, 21 bp, homo sapiens
tagcagacaagctgagcaccg

SEQ ID NO: 43874 - RNA, 21 nt, RNAi
gcagacaagcugagcaccguu

SEQ ID NO: 43875 - RNA, 21 nt, RNAi
uucgucuguucgacucguggc

SEQ ID NO: 43876 - DNA, 21 bp, homo sapiens
taaccagagaactattactag

SEQ ID NO: 43877 - RNA, 21 nt, RNAi
accagagaacuauuacuaguu

SEQ ID NO: 43878 - RNA, 21 nt, RNAi
uuuggucucuugauaaugauc

SEQ ID NO: 43879 - DNA, 21 bp, homo sapiens
tattactaggccttgaagaac

SEQ ID NO: 43880 - RNA, 21 nt, RNAi
uuacuaggccuugaagaacuu

SEQ ID NO: 43881 - RNA, 21 nt, RNAi
uuaaugauccggaacuucuug

SEQ ID NO: 43882 - DNA, 21 bp, homo sapiens
tactaggccttgaagaacctg

SEQ ID NO: 43883 - RNA, 21 nt, RNAi
cuaggccuugaagaaccuguu

SEQ ID NO: 43884 - RNA, 21 nt, RNAi
uugauccggaacuucuuggac

SEQ ID NO: 43885 - DNA, 21 bp, homo sapiens
taggccttgaagaacctgtct

SEQ ID NO: 43886 - RNA, 21 nt, RNAi
ggccuugaagaaccugucuuu

SEQ ID NO: 43887 - RNA, 21 nt, RNAi
uuccggaacuucuuggacaga

SEQ ID NO: 43888 - DNA, 21 bp, homo sapiens
taactggatgctcattgcctg

SEQ ID NO: 43889 - RNA, 21 nt, RNAi
acuggaugcucauugccuguu

SEQ ID NO: 43890 - RNA, 21 nt, RNAi
uuugaccuacgaguaacggac

SEQ ID NO: 43891 - DNA, 21 bp, homo sapiens
taatgcacaggtgtgagtgga

SEQ ID NO: 43892 - RNA, 21 nt, RNAi
augcacaggugugaguggauu

SEQ ID NO: 43893 - RNA, 21 nt, RNAi
uuuacguguccacacucaccu

SEQ ID NO: 43894 - DNA, 21 bp, homo sapiens
tatggctatgagataggttga

SEQ ID NO: 43895 - RNA, 21 nt, RNAi
uggcuaugagauagguugauu

SEQ ID NO: 43896 - RNA, 21 nt, RNAi
uuaccgauacucuauccaacu

SEQ ID NO: 43897 - DNA, 21 bp, homo sapiens
tatgagataggttgatctcgc

SEQ ID NO: 43898 - RNA, 21 nt, RNAi
ugagauagguugaucucgcuu

SEQ ID NO: 43899 - RNA, 21 nt, RNAi
uuacucuauccaacuagagcg

SEQ ID NO: 43900 - DNA, 21 bp, homo sapiens
tatgctgtgctttcctcagca

SEQ ID NO: 43901 - RNA, 21 nt, RNAi
ugcugugcuuuccucagcauu

SEQ ID NO: 43902 - RNA, 21 nt, RNAi
uuacgacacgaaaggagucgu

SEQ ID NO: 43903 - DNA, 21 bp, homo sapiens
tatggctctgacatctcttag

SEQ ID NO: 43904 - RNA, 21 nt, RNAi
uggcucugacaucucuuaguu

SEQ ID NO: 43905 - RNA, 21 nt, RNAi
uuaccgagacuguagagaauc

SEQ ID NO: 43906 - DNA, 21 bp, homo sapiens
tacttcctaaacatctgtctg

SEQ ID NO: 43907 - RNA, 21 nt, RNAi
cuuccuaaacaucugucuguu

SEQ ID NO: 43908 - RNA, 21 nt, RNAi
uugaaggauuuguagacagac

SEQ ID NO: 43909 - DNA, 21 bp, homo sapiens
tagtcttgaatgtcttatgct

SEQ ID NO: 43910 - RNA, 21 nt, RNAi
gucuugaaugucuuaugcuuu

SEQ ID NO: 43911 - RNA, 21 nt, RNAi
uucagaacuuacagaauacga

SEQ ID NO: 43912 - DNA, 21 bp, homo sapiens
tatttggtgttgagcctctct

SEQ ID NO: 43913 - RNA, 21 nt, RNAi
uuugguguugagccucucuuu

SEQ ID NO: 43914 - RNA, 21 nt, RNAi
uuaaaccacaacucggagaga

SEQ ID NO: 43915 - DNA, 21 bp, homo sapiens
tagcagttgaagaggttgtgt

SEQ ID NO: 43916 - RNA, 21 nt, RNAi
gcaguugaagagguuguguuu

SEQ ID NO: 43917 - RNA, 21 nt, RNAi
uucgucaacuucuccaacaca

SEQ ID NO: 43918 - DNA, 21 bp, homo sapiens
taaagtcgttcctccaacata

SEQ ID NO: 43919 - RNA, 21 nt, RNAi
aagucguuccuccaacauauu

SEQ ID NO: 43920 - RNA, 21 nt, RNAi
uuuucagcaaggagguuguau

SEQ ID NO: 43921 - DNA, 21 bp, homo sapiens
tagtgtgtattggtctgaagg

SEQ ID NO: 43922 - RNA, 21 nt, RNAi
guguguauuggucugaagguu

SEQ ID NO: 43923 - RNA, 21 nt, RNAi
uucacacauaaccagacuucc

SEQ ID NO: 43924 - DNA, 21 bp, homo sapiens
tatggacattgtggccaccat

SEQ ID NO: 43925 - RNA, 21 nt, RNAi
uggacauuguggccaccauuu

SEQ ID NO: 43926 - RNA, 21 nt, RNAi
uuaccuguaacaccgguggua

SEQ ID NO: 43927 - DNA, 21 bp, homo sapiens
aagccgagaggagaagacagc

SEQ ID NO: 43928 - RNA, 21 nt, RNAi
gccgagaggagaagacagcuu

SEQ ID NO: 43929 - RNA, 21 nt, RNAi
uucggcucuccucuucugucg

SEQ ID NO: 43930 - DNA, 21 bp, homo sapiens
aatttgaaccaccgtttccat

SEQ ID NO: 43931 - RNA, 21 nt, RNAi
uuugaaccaccguuuccauuu

SEQ ID NO: 43932 - RNA, 21 nt, RNAi
uuaaacuugguggcaaaggua

SEQ ID NO: 43933 - DNA, 21 bp, homo sapiens
aaccaccgtttccatcgtctc

SEQ ID NO: 43934 - RNA, 21 nt, RNAi
ccaccguuuccaucgucucuu

SEQ ID NO: 43935 - RNA, 21 nt, RNAi
uugguggcaaagguagcagag

SEQ ID NO: 43936 - DNA, 21 bp, homo sapiens
aaggtctatgactcatgctaa

SEQ ID NO: 43937 - RNA, 21 nt, RNAi
ggucuaugacucaugcuaauu

SEQ ID NO: 43938 - RNA, 21 nt, RNAi
uuccagauacugaguacgauu

SEQ ID NO: 43939 - DNA, 21 bp, homo sapiens
aagcgagctagacagccactt

SEQ ID NO: 43940 - RNA, 21 nt, RNAi
gcgagcuagacagccacuuuu

SEQ ID NO: 43941 - RNA, 21 nt, RNAi
uucgcucgaucugucggugaa

SEQ ID NO: 43942 - DNA, 21 bp, homo sapiens
aaacgctgttctgacaacact

SEQ ID NO: 43943 - RNA, 21 nt, RNAi
acgcuguucugacaacacuuu

SEQ ID NO: 43944 - RNA, 21 nt, RNAi
uuugcgacaagacuguuguga

SEQ ID NO: 43945 - DNA, 21 bp, homo sapiens
aacgctgttctgacaacactg

SEQ ID NO: 43946 - RNA, 21 nt, RNAi
cgcuguucugacaacacuguu

SEQ ID NO: 43947 - RNA, 21 nt, RNAi
uugcgacaagacuguugugac

SEQ ID NO: 43948 - DNA, 21 bp, homo sapiens
aacactgaagtagaagtttct

SEQ ID NO: 43949 - RNA, 21 nt, RNAi
cacugaaguagaaguuucuuu

SEQ ID NO: 43950 - RNA, 21 nt, RNAi
uugugacuucaucuucaaaga

SEQ ID NO: 43951 - DNA, 21 bp, homo sapiens
aagtagaagtttctaacttgg

SEQ ID NO: 43952 - RNA, 21 nt, RNAi
guagaaguuucuaacuugguu

SEQ ID NO: 43953 - RNA, 21 nt, RNAi
uucaucuucaaagauugaacc

SEQ ID NO: 43954 - DNA, 21 bp, homo sapiens
aaataaacaaccagttgagtc

SEQ ID NO: 43955 - RNA, 21 nt, RNAi
auaaacaaccaguugagucuu

SEQ ID NO: 43956 - RNA, 21 nt, RNAi
uuuauuuguuggucaacucag

SEQ ID NO: 43957 - DNA, 21 bp, homo sapiens
aataaacaaccagttgagtcg

SEQ ID NO: 43958 - RNA, 21 nt, RNAi
uaaacaaccaguugagucguu

SEQ ID NO: 43959 - RNA, 21 nt, RNAi
uuauuuguuggucaacucagc

SEQ ID NO: 43960 - DNA, 21 bp, homo sapiens
aaacaaccagttgagtcgaca

SEQ ID NO: 43961 - RNA, 21 nt, RNAi
acaaccaguugagucgacauu

SEQ ID NO: 43962 - RNA, 21 nt, RNAi
uuuguuggucaacucagcugu

SEQ ID NO: 43963 - DNA, 21 bp, homo sapiens
aacaaccagttgagtcgacat

SEQ ID NO: 43964 - RNA, 21 nt, RNAi
caaccaguugagucgacauuu

SEQ ID NO: 43965 - RNA, 21 nt, RNAi
uuguuggucaacucagcugua

SEQ ID NO: 43966 - DNA, 21 bp, homo sapiens
aaccagttgagtcgacatctg

SEQ ID NO: 43967 - RNA, 21 nt, RNAi
ccaguugagucgacaucuguu

SEQ ID NO: 43968 - RNA, 21 nt, RNAi
uuggucaacucagcuguagac

SEQ ID NO: 43969 - DNA, 21 bp, homo sapiens
aaatcttgttctccaagtcct

SEQ ID NO: 43970 - RNA, 21 nt, RNAi
aucuuguucuccaaguccuuu

SEQ ID NO: 43971 - RNA, 21 nt, RNAi
uuuagaacaagagguucagga

SEQ ID NO: 43972 - DNA, 21 bp, homo sapiens
aatcttgttctccaagtcctg

SEQ ID NO: 43973 - RNA, 21 nt, RNAi
ucuuguucuccaaguccuguu

SEQ ID NO: 43974 - RNA, 21 nt, RNAi
uuagaacaagagguucaggac

SEQ ID NO: 43975 - DNA, 21 bp, homo sapiens
aagtcctgtgtctcctcaggt

SEQ ID NO: 43976 - RNA, 21 nt, RNAi
guccugugucuccucagguuu

SEQ ID NO: 43977 - RNA, 21 nt, RNAi
uucaggacacagaggagucca

SEQ ID NO: 43978 - DNA, 21 bp, homo sapiens
aagcagcagataccatcagtg

SEQ ID NO: 43979 - RNA, 21 nt, RNAi
gcagcagauaccaucaguguu

SEQ ID NO: 43980 - RNA, 21 nt, RNAi
uucgucgucuaugguagucac

SEQ ID NO: 43981 - DNA, 21 bp, homo sapiens
aactcaagattggaagcaact

SEQ ID NO: 43982 - RNA, 21 nt, RNAi
cucaagauuggaagcaacuuu

SEQ ID NO: 43983 - RNA, 21 nt, RNAi
uugaguucuaaccuucguuga

SEQ ID NO: 43984 - DNA, 21 bp, homo sapiens
aagattggaagcaactgcagc

SEQ ID NO: 43985 - RNA, 21 nt, RNAi
gauuggaagcaacugcagcuu

SEQ ID NO: 43986 - RNA, 21 nt, RNAi
uucuaaccuucguugacgucg

SEQ ID NO: 43987 - DNA, 21 bp, homo sapiens
aagcaactgcagcctcctcag

SEQ ID NO: 43988 - RNA, 21 nt, RNAi
gcaacugcagccuccucaguu

SEQ ID NO: 43989 - RNA, 21 nt, RNAi
uucguugacgucggaggaguc

SEQ ID NO: 43990 - DNA, 21 bp, homo sapiens
aactgcagcctcctcagttaa

SEQ ID NO: 43991 - RNA, 21 nt, RNAi
cugcagccuccucaguuaauu

SEQ ID NO: 43992 - RNA, 21 nt, RNAi
uugacgucggaggagucaauu

SEQ ID NO: 43993 - DNA, 21 bp, homo sapiens
aaacttgcagagcaacggcgc

SEQ ID NO: 43994 - RNA, 21 nt, RNAi
acuugcagagcaacggcgcuu

SEQ ID NO: 43995 - RNA, 21 nt, RNAi
uuugaacgucucguugccgcg

SEQ ID NO: 43996 - DNA, 21 bp, homo sapiens
aatgatgatatgacagatgac

SEQ ID NO: 43997 - RNA, 21 nt, RNAi
ugaugauaugacagaugacuu

SEQ ID NO: 43998 - RNA, 21 nt, RNAi
uuacuacuauacugucuacug

SEQ ID NO: 43999 - DNA, 21 bp, homo sapiens
aaagctcactcttctcaccaa

SEQ ID NO: 44000 - RNA, 21 nt, RNAi
agcucacucuucucaccaauu

SEQ ID NO: 44001 - RNA, 21 nt, RNAi
uuucgagugagaagagugguu

SEQ ID NO: 44002 - DNA, 21 bp, homo sapiens
aagctcactcttctcaccaat

SEQ ID NO: 44003 - RNA, 21 nt, RNAi
gcucacucuucucaccaauuu

SEQ ID NO: 44004 - RNA, 21 nt, RNAi
uucgagugagaagagugguua

SEQ ID NO: 44005 - DNA, 21 bp, homo sapiens
aaacctctgctttcaaatgcc

SEQ ID NO: 44006 - RNA, 21 nt, RNAi
accucugcuuucaaaugccuu

SEQ ID NO: 44007 - RNA, 21 nt, RNAi
uuuggagacgaaaguuuacgg

SEQ ID NO: 44008 - DNA, 21 bp, homo sapiens
aacctctgctttcaaatgcct

SEQ ID NO: 44009 - RNA, 21 nt, RNAi
ccucugcuuucaaaugccuuu

SEQ ID NO: 44010 - RNA, 21 nt, RNAi
uuggagacgaaaguuuacgga

SEQ ID NO: 44011 - DNA, 21 bp, homo sapiens
aaatgcctcggcaactccagt

SEQ ID NO: 44012 - RNA, 21 nt, RNAi
augccucggcaacuccaguuu

SEQ ID NO: 44013 - RNA, 21 nt, RNAi
uuuacggagccguugagguca

SEQ ID NO: 44014 - DNA, 21 bp, homo sapiens
aatgcctcggcaactccagtt

SEQ ID NO: 44015 - RNA, 21 nt, RNAi
ugccucggcaacuccaguuuu

SEQ ID NO: 44016 - RNA, 21 nt, RNAi
uuacggagccguugaggucaa

SEQ ID NO: 44017 - DNA, 21 bp, homo sapiens
aatcttgccgcaactatttgc

SEQ ID NO: 44018 - RNA, 21 nt, RNAi
ucuugccgcaacuauuugcuu

SEQ ID NO: 44019 - RNA, 21 nt, RNAi
uuagaacggcguugauaaacg

SEQ ID NO: 44020 - DNA, 21 bp, homo sapiens
aaacagtgtacaagaacagcc

SEQ ID NO: 44021 - RNA, 21 nt, RNAi
acaguguacaagaacagccuu

SEQ ID NO: 44022 - RNA, 21 nt, RNAi
uuugucacauguucuugucgg

SEQ ID NO: 44023 - DNA, 21 bp, homo sapiens
aacagtgtacaagaacagcct

SEQ ID NO: 44024 - RNA, 21 nt, RNAi
caguguacaagaacagccuuu

SEQ ID NO: 44025 - RNA, 21 nt, RNAi
uugucacauguucuugucgga

SEQ ID NO: 44026 - DNA, 21 bp, homo sapiens
aagaacagcctggtaccgctt

SEQ ID NO: 44027 - RNA, 21 nt, RNAi
gaacagccugguaccgcuuuu

SEQ ID NO: 44028 - RNA, 21 nt, RNAi
uucuugucggaccauggcgaa

SEQ ID NO: 44029 - DNA, 21 bp, homo sapiens
aacagcctggtaccgcttgtt

SEQ ID NO: 44030 - RNA, 21 nt, RNAi
cagccugguaccgcuuguuuu

SEQ ID NO: 44031 - RNA, 21 nt, RNAi
uugucggaccauggcgaacaa

SEQ ID NO: 44032 - DNA, 21 bp, homo sapiens
aagtggagcatctgctaggat

SEQ ID NO: 44033 - RNA, 21 nt, RNAi
guggagcaucugcuaggauuu

SEQ ID NO: 44034 - RNA, 21 nt, RNAi
uucaccucguagacgauccua

SEQ ID NO: 44035 - DNA, 21 bp, homo sapiens
aatagcagcagtgttaagcag

SEQ ID NO: 44036 - RNA, 21 nt, RNAi
uagcagcaguguuaagcaguu

SEQ ID NO: 44037 - RNA, 21 nt, RNAi
uuaucgucgucacaauucguc

SEQ ID NO: 44038 - DNA, 21 bp, homo sapiens
aagcaggaagctacattctgt

SEQ ID NO: 44039 - RNA, 21 nt, RNAi
gcaggaagcuacauucuguuu

SEQ ID NO: 44040 - RNA, 21 nt, RNAi
uucguccuucgauguaagaca

SEQ ID NO: 44041 - DNA, 21 bp, homo sapiens
aagtgctgatgatgcgtcttt

SEQ ID NO: 44042 - RNA, 21 nt, RNAi
gugcugaugaugcgucuuuuu

SEQ ID NO: 44043 - RNA, 21 nt, RNAi
uucacgacuacuacgcagaaa

SEQ ID NO: 44044 - DNA, 21 bp, homo sapiens
aatgcctcaatttccagctct

SEQ ID NO: 44045 - RNA, 21 nt, RNAi
ugccucaauuuccagcucuuu

SEQ ID NO: 44046 - RNA, 21 nt, RNAi
uuacggaguuaaaggucgaga

SEQ ID NO: 44047 - DNA, 21 bp, homo sapiens
aatttccagctctgtgaaagc

SEQ ID NO: 44048 - RNA, 21 nt, RNAi
uuuccagcucugugaaagcuu

SEQ ID NO: 44049 - RNA, 21 nt, RNAi
uuaaaggucgagacacuuucg

SEQ ID NO: 44050 - DNA, 21 bp, homo sapiens
aaagctacttcttctccagtg

SEQ ID NO: 44051 - RNA, 21 nt, RNAi
agcuacuucuucuccaguguu

SEQ ID NO: 44052 - RNA, 21 nt, RNAi
uuucgaugaagaagaggucac

SEQ ID NO: 44053 - DNA, 21 bp, homo sapiens
aagctacttcttctccagtga

SEQ ID NO: 44054 - RNA, 21 nt, RNAi
gcuacuucuucuccagugauu

SEQ ID NO: 44055 - RNA, 21 nt, RNAi
uucgaugaagaagaggucacu

SEQ ID NO: 44056 - DNA, 21 bp, homo sapiens
aatctactacatctatcactg

SEQ ID NO: 44057 - RNA, 21 nt, RNAi
ucuacuacaucuaucacuguu

SEQ ID NO: 44058 - RNA, 21 nt, RNAi
uuagaugauguagauagugac

SEQ ID NO: 44059 - DNA, 21 bp, homo sapiens
aaatcctgagctacttccaaa

SEQ ID NO: 44060 - RNA, 21 nt, RNAi
auccugagcuacuuccaaauu

SEQ ID NO: 44061 - RNA, 21 nt, RNAi
uuuaggacucgaugaagguuu

SEQ ID NO: 44062 - DNA, 21 bp, homo sapiens
aaactcctattagtcctctga

SEQ ID NO: 44063 - RNA, 21 nt, RNAi
acuccuauuaguccucugauu

SEQ ID NO: 44064 - RNA, 21 nt, RNAi
uuugaggauaaucaggagacu

SEQ ID NO: 44065 - DNA, 21 bp, homo sapiens
aactcctattagtcctctgaa

SEQ ID NO: 44066 - RNA, 21 nt, RNAi
cuccuauuaguccucugaauu

SEQ ID NO: 44067 - RNA, 21 nt, RNAi
uugaggauaaucaggagacuu

SEQ ID NO: 44068 - DNA, 21 bp, homo sapiens
aaaccaattgtgaagtcaact

SEQ ID NO: 44069 - RNA, 21 nt, RNAi
accaauugugaagucaacuuu

SEQ ID NO: 44070 - RNA, 21 nt, RNAi
uuugguuaacacuucaguuga

SEQ ID NO: 44071 - DNA, 21 bp, homo sapiens
aaccaattgtgaagtcaactt

SEQ ID NO: 44072 - RNA, 21 nt, RNAi
ccaauugugaagucaacuuuu

SEQ ID NO: 44073 - RNA, 21 nt, RNAi
uugguuaacacuucaguugaa

SEQ ID NO: 44074 - DNA, 21 bp, homo sapiens
aagtagagaaatttgtctgca

SEQ ID NO: 44075 - RNA, 21 nt, RNAi
guagagaaauuugucugcauu

SEQ ID NO: 44076 - RNA, 21 nt, RNAi
uucaucucuuuaaacagacgu

SEQ ID NO: 44077 - DNA, 21 bp, homo sapiens
aatttgtctgcaatctcaatc

SEQ ID NO: 44078 - RNA, 21 nt, RNAi
uuugucugcaaucucaaucuu

SEQ ID NO: 44079 - RNA, 21 nt, RNAi
uuaaacagacguuagaguuag

SEQ ID NO: 44080 - DNA, 21 bp, homo sapiens
aaagacaaatctacgacacca

SEQ ID NO: 44081 - RNA, 21 nt, RNAi
agacaaaucuacgacaccauu

SEQ ID NO: 44082 - RNA, 21 nt, RNAi
uuucuguuuagaugcuguggu

SEQ ID NO: 44083 - DNA, 21 bp, homo sapiens
aagacaaatctacgacaccag

SEQ ID NO: 44084 - RNA, 21 nt, RNAi
gacaaaucuacgacaccaguu

SEQ ID NO: 44085 - RNA, 21 nt, RNAi
uucuguuuagaugcugugguc

SEQ ID NO: 44086 - DNA, 21 bp, homo sapiens
aaatctacgacaccaggagga

SEQ ID NO: 44087 - RNA, 21 nt, RNAi
aucuacgacaccaggaggauu

SEQ ID NO: 44088 - RNA, 21 nt, RNAi
uuuagaugcugugguccuccu

SEQ ID NO: 44089 - DNA, 21 bp, homo sapiens
aatctacgacaccaggaggaa

SEQ ID NO: 44090 - RNA, 21 nt, RNAi
ucuacgacaccaggaggaauu

SEQ ID NO: 44091 - RNA, 21 nt, RNAi
uuagaugcugugguccuccuu

SEQ ID NO: 44092 - DNA, 21 bp, homo sapiens
aacaggaattaagcctttcct

SEQ ID NO: 44093 - RNA, 21 nt, RNAi
caggaauuaagccuuuccuuu

SEQ ID NO: 44094 - RNA, 21 nt, RNAi
uuguccuuaauucggaaagga

SEQ ID NO: 44095 - DNA, 21 bp, homo sapiens
aattaagcctttcctggaacg

SEQ ID NO: 44096 - RNA, 21 nt, RNAi
uuaagccuuuccuggaacguu

SEQ ID NO: 44097 - RNA, 21 nt, RNAi
uuaauucggaaaggaccuugc

SEQ ID NO: 44098 - DNA, 21 bp, homo sapiens
aagcctttcctggaacgcttt

SEQ ID NO: 44099 - RNA, 21 nt, RNAi
gccuuuccuggaacgcuuuuu

SEQ ID NO: 44100 - RNA, 21 nt, RNAi
uucggaaaggaccuugcgaaa

SEQ ID NO: 44101 - DNA, 21 bp, homo sapiens
aacgctttggagagcgttgtc

SEQ ID NO: 44102 - RNA, 21 nt, RNAi
cgcuuuggagagcguugucuu

SEQ ID NO: 44103 - RNA, 21 nt, RNAi
uugcgaaaccucucgcaacag

SEQ ID NO: 44104 - DNA, 21 bp, homo sapiens
aagaacatagcaaagaaagtc

SEQ ID NO: 44105 - RNA, 21 nt, RNAi
gaacauagcaaagaaagucuu

SEQ ID NO: 44106 - RNA, 21 nt, RNAi
uucuuguaucguuucuuucag

SEQ ID NO: 44107 - DNA, 21 bp, homo sapiens
aacatagcaaagaaagtccag

SEQ ID NO: 44108 - RNA, 21 nt, RNAi
cauagcaaagaaaguccaguu

SEQ ID NO: 44109 - RNA, 21 nt, RNAi
uuguaucguuucuuucagguc

SEQ ID NO: 44110 - DNA, 21 bp, homo sapiens
aaagaaagtccagctcgtagc

SEQ ID NO: 44111 - RNA, 21 nt, RNAi
agaaaguccagcucguagcuu

SEQ ID NO: 44112 - RNA, 21 nt, RNAi
uuucuuucaggucgagcaucg

SEQ ID NO: 44113 - DNA, 21 bp, homo sapiens
aagaaagtccagctcgtagca

SEQ ID NO: 44114 - RNA, 21 nt, RNAi
gaaaguccagcucguagcauu

SEQ ID NO: 44115 - RNA, 21 nt, RNAi
uucuuucaggucgagcaucgu

SEQ ID NO: 44116 - DNA, 21 bp, homo sapiens
aaagtccagctcgtagcacac

SEQ ID NO: 44117 - RNA, 21 nt, RNAi
aguccagcucguagcacacuu

SEQ ID NO: 44118 - RNA, 21 nt, RNAi
uuucaggucgagcaucgugug

SEQ ID NO: 44119 - DNA, 21 bp, homo sapiens
aagtccagctcgtagcacacc

SEQ ID NO: 44120 - RNA, 21 nt, RNAi
guccagcucguagcacaccuu

SEQ ID NO: 44121 - RNA, 21 nt, RNAi
uucaggucgagcaucgugugg

SEQ ID NO: 44122 - DNA, 21 bp, homo sapiens
aaatacaaaggccatccaaga

SEQ ID NO: 44123 - RNA, 21 nt, RNAi
auacaaaggccauccaagauu

SEQ ID NO: 44124 - RNA, 21 nt, RNAi
uuuauguuuccgguagguucu

SEQ ID NO: 44125 - DNA, 21 bp, homo sapiens
aatacaaaggccatccaagaa

SEQ ID NO: 44126 - RNA, 21 nt, RNAi
uacaaaggccauccaagaauu

SEQ ID NO: 44127 - RNA, 21 nt, RNAi
uuauguuuccgguagguucuu

SEQ ID NO: 44128 - DNA, 21 bp, homo sapiens
aaaggccatccaagaaagatt

SEQ ID NO: 44129 - RNA, 21 nt, RNAi
aggccauccaagaaagauuuu

SEQ ID NO: 44130 - RNA, 21 nt, RNAi
uuuccgguagguucuuucuaa

SEQ ID NO: 44131 - DNA, 21 bp, homo sapiens
aaggccatccaagaaagatta

SEQ ID NO: 44132 - RNA, 21 nt, RNAi
ggccauccaagaaagauuauu

SEQ ID NO: 44133 - RNA, 21 nt, RNAi
uuccgguagguucuuucuaau

SEQ ID NO: 44134 - DNA, 21 bp, homo sapiens
aagattattcaagcaagacac

SEQ ID NO: 44135 - RNA, 21 nt, RNAi
gauuauucaagcaagacacuu

SEQ ID NO: 44136 - RNA, 21 nt, RNAi
uucuaauaaguucguucugug

SEQ ID NO: 44137 - DNA, 21 bp, homo sapiens
aagcaagacacatcttcatct

SEQ ID NO: 44138 - RNA, 21 nt, RNAi
gcaagacacaucuucaucuuu

SEQ ID NO: 44139 - RNA, 21 nt, RNAi
uucguucuguguagaaguaga

SEQ ID NO: 44140 - DNA, 21 bp, homo sapiens
aagacacatcttcatctacta

SEQ ID NO: 44141 - RNA, 21 nt, RNAi
gacacaucuucaucuacuauu

SEQ ID NO: 44142 - RNA, 21 nt, RNAi
uucuguguagaaguagaugau

SEQ ID NO: 44143 - DNA, 21 bp, homo sapiens
aacagctcaagcaggaacgtc

SEQ ID NO: 44144 - RNA, 21 nt, RNAi
cagcucaagcaggaacgucuu

SEQ ID NO: 44145 - RNA, 21 nt, RNAi
uugucgaguucguccuugcag

SEQ ID NO: 44146 - DNA, 21 bp, homo sapiens
aaagaactagcatgtcttcgt

SEQ ID NO: 44147 - RNA, 21 nt, RNAi
agaacuagcaugucuucguuu

SEQ ID NO: 44148 - RNA, 21 nt, RNAi
uuucuugaucguacagaagca

SEQ ID NO: 44149 - DNA, 21 bp, homo sapiens
aagaactagcatgtcttcgtg

SEQ ID NO: 44150 - RNA, 21 nt, RNAi
gaacuagcaugucuucguguu

SEQ ID NO: 44151 - RNA, 21 nt, RNAi
uucuugaucguacagaagcac

SEQ ID NO: 44152 - DNA, 21 bp, homo sapiens
aactagcatgtcttcgtggcc

SEQ ID NO: 44153 - RNA, 21 nt, RNAi
cuagcaugucuucguggccuu

SEQ ID NO: 44154 - RNA, 21 nt, RNAi
uugaucguacagaagcaccgg

SEQ ID NO: 44155 - DNA, 21 bp, homo sapiens
aaagcaaacaactagaaacca

SEQ ID NO: 44156 - RNA, 21 nt, RNAi
agcaaacaacuagaaaccauu

SEQ ID NO: 44157 - RNA, 21 nt, RNAi
uuucguuuguugaucuuuggu

SEQ ID NO: 44158 - DNA, 21 bp, homo sapiens
aagcaaacaactagaaaccaa

SEQ ID NO: 44159 - RNA, 21 nt, RNAi
gcaaacaacuagaaaccaauu

SEQ ID NO: 44160 - RNA, 21 nt, RNAi
uucguuuguugaucuuugguu

SEQ ID NO: 44161 - DNA, 21 bp, homo sapiens
aaacaactagaaaccaaacag

SEQ ID NO: 44162 - RNA, 21 nt, RNAi
acaacuagaaaccaaacaguu

SEQ ID NO: 44163 - RNA, 21 nt, RNAi
uuuguugaucuuugguuuguc

SEQ ID NO: 44164 - DNA, 21 bp, homo sapiens
aacaactagaaaccaaacagg

SEQ ID NO: 44165 - RNA, 21 nt, RNAi
caacuagaaaccaaacagguu

SEQ ID NO: 44166 - RNA, 21 nt, RNAi
uuguugaucuuugguuugucc

SEQ ID NO: 44167 - DNA, 21 bp, homo sapiens
aactagaaaccaaacaggaaa

SEQ ID NO: 44168 - RNA, 21 nt, RNAi
cuagaaaccaaacaggaaauu

SEQ ID NO: 44169 - RNA, 21 nt, RNAi
uugaucuuugguuuguccuuu

SEQ ID NO: 44170 - DNA, 21 bp, homo sapiens
aaaccaaacaggaaactcact

SEQ ID NO: 44171 - RNA, 21 nt, RNAi
accaaacaggaaacucacuuu

SEQ ID NO: 44172 - RNA, 21 nt, RNAi
uuugguuuguccuuugaguga

SEQ ID NO: 44173 - DNA, 21 bp, homo sapiens
aaccaaacaggaaactcactg

SEQ ID NO: 44174 - RNA, 21 nt, RNAi
ccaaacaggaaacucacuguu

SEQ ID NO: 44175 - RNA, 21 nt, RNAi
uugguuuguccuuugagugac

SEQ ID NO: 44176 - DNA, 21 bp, homo sapiens
aaacaggaaactcactgtcag

SEQ ID NO: 44177 - RNA, 21 nt, RNAi
acaggaaacucacugucaguu

SEQ ID NO: 44178 - RNA, 21 nt, RNAi
uuuguccuuugagugacaguc

SEQ ID NO: 44179 - DNA, 21 bp, homo sapiens
aacaggaaactcactgtcaga

SEQ ID NO: 44180 - RNA, 21 nt, RNAi
caggaaacucacugucagauu

SEQ ID NO: 44181 - RNA, 21 nt, RNAi
uuguccuuugagugacagucu

SEQ ID NO: 44182 - DNA, 21 bp, homo sapiens
aaactcactgtcagagcactc

SEQ ID NO: 44183 - RNA, 21 nt, RNAi
acucacugucagagcacucuu

SEQ ID NO: 44184 - RNA, 21 nt, RNAi
uuugagugacagucucgugag

SEQ ID NO: 44185 - DNA, 21 bp, homo sapiens
aactcactgtcagagcactcc

SEQ ID NO: 44186 - RNA, 21 nt, RNAi
cucacugucagagcacuccuu

SEQ ID NO: 44187 - RNA, 21 nt, RNAi
uugagugacagucucgugagg

SEQ ID NO: 44188 - DNA, 21 bp, homo sapiens
aaactcagtcacttccagtaa

SEQ ID NO: 44189 - RNA, 21 nt, RNAi
acucagucacuuccaguaauu

SEQ ID NO: 44190 - RNA, 21 nt, RNAi
uuugagucagugaaggucauu

SEQ ID NO: 44191 - DNA, 21 bp, homo sapiens
aactcagtcacttccagtaac

SEQ ID NO: 44192 - RNA, 21 nt, RNAi
cucagucacuuccaguaacuu

SEQ ID NO: 44193 - RNA, 21 nt, RNAi
uugagucagugaaggucauug

SEQ ID NO: 44194 - DNA, 21 bp, homo sapiens
aaattccagtacagaacctaa

SEQ ID NO: 44195 - RNA, 21 nt, RNAi
auuccaguacagaaccuaauu

SEQ ID NO: 44196 - RNA, 21 nt, RNAi
uuuaaggucaugucuuggauu

SEQ ID NO: 44197 - DNA, 21 bp, homo sapiens
aattccagtacagaacctaaa

SEQ ID NO: 44198 - RNA, 21 nt, RNAi
uuccaguacagaaccuaaauu

SEQ ID NO: 44199 - RNA, 21 nt, RNAi
uuaaggucaugucuuggauuu

SEQ ID NO: 44200 - DNA, 21 bp, homo sapiens
aacctaaaggtttcactgaat

SEQ ID NO: 44201 - RNA, 21 nt, RNAi
ccuaaagguuucacugaauuu

SEQ ID NO: 44202 - RNA, 21 nt, RNAi
uuggauuuccaaagugacuua

SEQ ID NO: 44203 - DNA, 21 bp, homo sapiens
aaaggtttcactgaatgcgaa

SEQ ID NO: 44204 - RNA, 21 nt, RNAi
agguuucacugaaugcgaauu

SEQ ID NO: 44205 - RNA, 21 nt, RNAi
uuuccaaagugacuuacgcuu

SEQ ID NO: 44206 - DNA, 21 bp, homo sapiens
aaggtttcactgaatgcgaaa

SEQ ID NO: 44207 - RNA, 21 nt, RNAi
gguuucacugaaugcgaaauu

SEQ ID NO: 44208 - RNA, 21 nt, RNAi
uuccaaagugacuuacgcuuu

SEQ ID NO: 44209 - DNA, 21 bp, homo sapiens
aatgcgaaatgacgaaatcta

SEQ ID NO: 44210 - RNA, 21 nt, RNAi
ugcgaaaugacgaaaucuauu

SEQ ID NO: 44211 - RNA, 21 nt, RNAi
uuacgcuuuacugcuuuagau

SEQ ID NO: 44212 - DNA, 21 bp, homo sapiens
aagtgatacgtgaaattgaga

SEQ ID NO: 44213 - RNA, 21 nt, RNAi
gugauacgugaaauugagauu

SEQ ID NO: 44214 - RNA, 21 nt, RNAi
uucacuaugcacuuuaacucu

SEQ ID NO: 44215 - DNA, 21 bp, homo sapiens
aaattgagatgagtgtggatg

SEQ ID NO: 44216 - RNA, 21 nt, RNAi
auugagaugaguguggauguu

SEQ ID NO: 44217 - RNA, 21 nt, RNAi
uuuaacucuacucacaccuac

SEQ ID NO: 44218 - DNA, 21 bp, homo sapiens
aattgagatgagtgtggatga

SEQ ID NO: 44219 - RNA, 21 nt, RNAi
uugagaugaguguggaugauu

SEQ ID NO: 44220 - RNA, 21 nt, RNAi
uuaacucuacucacaccuacu

SEQ ID NO: 44221 - DNA, 21 bp, homo sapiens
aattaatgacctcttcagtga

SEQ ID NO: 44222 - RNA, 21 nt, RNAi
uuaaugaccucuucagugauu

SEQ ID NO: 44223 - RNA, 21 nt, RNAi
uuaauuacuggagaagucacu

SEQ ID NO: 44224 - DNA, 21 bp, homo sapiens
aatgacctcttcagtgatgtc

SEQ ID NO: 44225 - RNA, 21 nt, RNAi
ugaccucuucagugaugucuu

SEQ ID NO: 44226 - RNA, 21 nt, RNAi
uuacuggagaagucacuacag

SEQ ID NO: 44227 - DNA, 21 bp, homo sapiens
aaggtgaactagatatggaga

SEQ ID NO: 44228 - RNA, 21 nt, RNAi
ggugaacuagauauggagauu

SEQ ID NO: 44229 - RNA, 21 nt, RNAi
uuccacuugaucuauaccucu

SEQ ID NO: 44230 - DNA, 21 bp, homo sapiens
aactagatatggagaagagcc

SEQ ID NO: 44231 - RNA, 21 nt, RNAi
cuagauauggagaagagccuu

SEQ ID NO: 44232 - RNA, 21 nt, RNAi
uugaucuauaccucuucucgg

SEQ ID NO: 44233 - DNA, 21 bp, homo sapiens
aagagccaagaggagatggat

SEQ ID NO: 44234 - RNA, 21 nt, RNAi
gagccaagaggagauggauuu

SEQ ID NO: 44235 - RNA, 21 nt, RNAi
uucucgguucuccucuaccua

SEQ ID NO: 44236 - DNA, 21 bp, homo sapiens
aagaggagatggatcaagcat

SEQ ID NO: 44237 - RNA, 21 nt, RNAi
gaggagauggaucaagcauuu

SEQ ID NO: 44238 - RNA, 21 nt, RNAi
uucuccucuaccuaguucgua

SEQ ID NO: 44239 - DNA, 21 bp, homo sapiens
aagcattagcagaaagcagcg

SEQ ID NO: 44240 - RNA, 21 nt, RNAi
gcauuagcagaaagcagcguu

SEQ ID NO: 44241 - RNA, 21 nt, RNAi
uucguaaucgucuuucgucgc

SEQ ID NO: 44242 - DNA, 21 bp, homo sapiens
aaagcagcgaagaacaggaag

SEQ ID NO: 44243 - RNA, 21 nt, RNAi
agcagcgaagaacaggaaguu

SEQ ID NO: 44244 - RNA, 21 nt, RNAi
uuucgucgcuucuuguccuuc

SEQ ID NO: 44245 - DNA, 21 bp, homo sapiens
aagcagcgaagaacaggaaga

SEQ ID NO: 44246 - RNA, 21 nt, RNAi
gcagcgaagaacaggaagauu

SEQ ID NO: 44247 - RNA, 21 nt, RNAi
uucgucgcuucuuguccuucu

SEQ ID NO: 44248 - DNA, 21 bp, homo sapiens
aagaacaggaagatgcactga

SEQ ID NO: 44249 - RNA, 21 nt, RNAi
gaacaggaagaugcacugauu

SEQ ID NO: 44250 - RNA, 21 nt, RNAi
uucuuguccuucuacgugacu

SEQ ID NO: 44251 - DNA, 21 bp, homo sapiens
aacaggaagatgcactgaata

SEQ ID NO: 44252 - RNA, 21 nt, RNAi
caggaagaugcacugaauauu

SEQ ID NO: 44253 - RNA, 21 nt, RNAi
uuguccuucuacgugacuuau

SEQ ID NO: 44254 - DNA, 21 bp, homo sapiens
aagatgcactgaatatctcct

SEQ ID NO: 44255 - RNA, 21 nt, RNAi
gaugcacugaauaucuccuuu

SEQ ID NO: 44256 - RNA, 21 nt, RNAi
uucuacgugacuuauagagga

SEQ ID NO: 44257 - DNA, 21 bp, homo sapiens
aatgtctttacttgcaccatt

SEQ ID NO: 44258 - RNA, 21 nt, RNAi
ugucuuuacuugcaccauuuu

SEQ ID NO: 44259 - RNA, 21 nt, RNAi
uuacagaaaugaacgugguaa

SEQ ID NO: 44260 - DNA, 21 bp, homo sapiens
aaacagttggtgtggtaagtc

SEQ ID NO: 44261 - RNA, 21 nt, RNAi
acaguuggugugguaagucuu

SEQ ID NO: 44262 - RNA, 21 nt, RNAi
uuugucaaccacaccauucag

SEQ ID NO: 44263 - DNA, 21 bp, homo sapiens
aacagttggtgtggtaagtcc

SEQ ID NO: 44264 - RNA, 21 nt, RNAi
caguuggugugguaaguccuu

SEQ ID NO: 44265 - RNA, 21 nt, RNAi
uugucaaccacaccauucagg

SEQ ID NO: 44266 - DNA, 21 bp, homo sapiens
aagtccagagagtttagtgtc

SEQ ID NO: 44267 - RNA, 21 nt, RNAi
guccagagaguuuagugucuu

SEQ ID NO: 44268 - RNA, 21 nt, RNAi
uucaggucucucaaaucacag

SEQ ID NO: 44269 - DNA, 21 bp, homo sapiens
aattgaaagacaccagcagaa

SEQ ID NO: 44270 - RNA, 21 nt, RNAi
uugaaagacaccagcagaauu

SEQ ID NO: 44271 - RNA, 21 nt, RNAi
uuaacuuucuguggucgucuu

SEQ ID NO: 44272 - DNA, 21 bp, homo sapiens
aaagacaccagcagaagtgat

SEQ ID NO: 44273 - RNA, 21 nt, RNAi
agacaccagcagaagugauuu

SEQ ID NO: 44274 - RNA, 21 nt, RNAi
uuucuguggucgucuucacua

SEQ ID NO: 44275 - DNA, 21 bp, homo sapiens
aagacaccagcagaagtgatg

SEQ ID NO: 44276 - RNA, 21 nt, RNAi
gacaccagcagaagugauguu

SEQ ID NO: 44277 - RNA, 21 nt, RNAi
uucuguggucgucuucacuac

SEQ ID NO: 44278 - DNA, 21 bp, homo sapiens
aaattccaaagaactcgtgtc

SEQ ID NO: 44279 - RNA, 21 nt, RNAi
auuccaaagaacucgugucuu

SEQ ID NO: 44280 - RNA, 21 nt, RNAi
uuuaagguuucuugagcacag

SEQ ID NO: 44281 - DNA, 21 bp, homo sapiens
aattccaaagaactcgtgtcc

SEQ ID NO: 44282 - RNA, 21 nt, RNAi
uuccaaagaacucguguccuu

SEQ ID NO: 44283 - RNA, 21 nt, RNAi
uuaagguuucuugagcacagg

SEQ ID NO: 44284 - DNA, 21 bp, homo sapiens
aatctggtgatagccttggtt

SEQ ID NO: 44285 - RNA, 21 nt, RNAi
ucuggugauagccuugguuuu

SEQ ID NO: 44286 - RNA, 21 nt, RNAi
uuagaccacuaucggaaccaa

SEQ ID NO: 44287 - DNA, 21 bp, homo sapiens
aagatcgtgatcttctttaca

SEQ ID NO: 44288 - RNA, 21 nt, RNAi
gaucgugaucuucuuuacauu

SEQ ID NO: 44289 - RNA, 21 nt, RNAi
uucuagcacuagaagaaaugu

SEQ ID NO: 44290 - DNA, 21 bp, homo sapiens
aagattcaaagaaacagaacg

SEQ ID NO: 44291 - RNA, 21 nt, RNAi
gauucaaagaaacagaacguu

SEQ ID NO: 44292 - RNA, 21 nt, RNAi
uucuaaguuucuuugucuugc

SEQ ID NO: 44293 - DNA, 21 bp, homo sapiens
aaagaaacagaacgtccatca

SEQ ID NO: 44294 - RNA, 21 nt, RNAi
agaaacagaacguccaucauu

SEQ ID NO: 44295 - RNA, 21 nt, RNAi
uuucuuugucuugcagguagu

SEQ ID NO: 44296 - DNA, 21 bp, homo sapiens
aagaaacagaacgtccatcaa

SEQ ID NO: 44297 - RNA, 21 nt, RNAi
gaaacagaacguccaucaauu

SEQ ID NO: 44298 - RNA, 21 nt, RNAi
uucuuugucuugcagguaguu

SEQ ID NO: 44299 - DNA, 21 bp, homo sapiens
aaacagaacgtccatcaataa

SEQ ID NO: 44300 - RNA, 21 nt, RNAi
acagaacguccaucaauaauu

SEQ ID NO: 44301 - RNA, 21 nt, RNAi
uuugucuugcagguaguuauu

SEQ ID NO: 44302 - DNA, 21 bp, homo sapiens
aacagaacgtccatcaataaa

SEQ ID NO: 44303 - RNA, 21 nt, RNAi
cagaacguccaucaauaaauu

SEQ ID NO: 44304 - RNA, 21 nt, RNAi
uugucuugcagguaguuauuu

SEQ ID NO: 44305 - DNA, 21 bp, homo sapiens
aacgtccatcaataaagcagg

SEQ ID NO: 44306 - RNA, 21 nt, RNAi
cguccaucaauaaagcagguu

SEQ ID NO: 44307 - RNA, 21 nt, RNAi
uugcagguaguuauuucgucc

SEQ ID NO: 44308 - DNA, 21 bp, homo sapiens
aataaagcaggtgattgttcg

SEQ ID NO: 44309 - RNA, 21 nt, RNAi
uaaagcaggugauuguucguu

SEQ ID NO: 44310 - RNA, 21 nt, RNAi
uuauuucguccacuaacaagc

SEQ ID NO: 44311 - DNA, 21 bp, homo sapiens
aaagcaggtgattgttcggaa

SEQ ID NO: 44312 - RNA, 21 nt, RNAi
agcaggugauuguucggaauu

SEQ ID NO: 44313 - RNA, 21 nt, RNAi
uuucguccacuaacaagccuu

SEQ ID NO: 44314 - DNA, 21 bp, homo sapiens
aagcaggtgattgttcggaag

SEQ ID NO: 44315 - RNA, 21 nt, RNAi
gcaggugauuguucggaaguu

SEQ ID NO: 44316 - RNA, 21 nt, RNAi
uucguccacuaacaagccuuc

SEQ ID NO: 44317 - DNA, 21 bp, homo sapiens
aaataatgcctttccttgtca

SEQ ID NO: 44318 - RNA, 21 nt, RNAi
auaaugccuuuccuugucauu

SEQ ID NO: 44319 - RNA, 21 nt, RNAi
uuuauuacggaaaggaacagu

SEQ ID NO: 44320 - DNA, 21 bp, homo sapiens
aataatgcctttccttgtcaa

SEQ ID NO: 44321 - RNA, 21 nt, RNAi
uaaugccuuuccuugucaauu

SEQ ID NO: 44322 - RNA, 21 nt, RNAi
uuauuacggaaaggaacaguu

SEQ ID NO: 44323 - DNA, 21 bp, homo sapiens
aatgcctttccttgtcaagtt

SEQ ID NO: 44324 - RNA, 21 nt, RNAi
ugccuuuccuugucaaguuuu

SEQ ID NO: 44325 - RNA, 21 nt, RNAi
uuacggaaaggaacaguucaa

SEQ ID NO: 44326 - DNA, 21 bp, homo sapiens
aaatgcaggaactcaataacg

SEQ ID NO: 44327 - RNA, 21 nt, RNAi
augcaggaacucaauaacguu

SEQ ID NO: 44328 - RNA, 21 nt, RNAi
uuuacguccuugaguuauugc

SEQ ID NO: 44329 - DNA, 21 bp, homo sapiens
aatgcaggaactcaataacga

SEQ ID NO: 44330 - RNA, 21 nt, RNAi
ugcaggaacucaauaacgauu

SEQ ID NO: 44331 - RNA, 21 nt, RNAi
uuacguccuugaguuauugcu

SEQ ID NO: 44332 - DNA, 21 bp, homo sapiens
aaatatgcaacagacagtgat

SEQ ID NO: 44333 - RNA, 21 nt, RNAi
auaugcaacagacagugauuu

SEQ ID NO: 44334 - RNA, 21 nt, RNAi
uuuauacguugucugucacua

SEQ ID NO: 44335 - DNA, 21 bp, homo sapiens
aatatgcaacagacagtgatc

SEQ ID NO: 44336 - RNA, 21 nt, RNAi
uaugcaacagacagugaucuu

SEQ ID NO: 44337 - RNA, 21 nt, RNAi
uuauacguugucugucacuag

SEQ ID NO: 44338 - DNA, 21 bp, homo sapiens
aacagacagtgatctatcaag

SEQ ID NO: 44339 - RNA, 21 nt, RNAi
cagacagugaucuaucaaguu

SEQ ID NO: 44340 - RNA, 21 nt, RNAi
uugucugucacuagauaguuc

SEQ ID NO: 44341 - DNA, 21 bp, homo sapiens
aagctagccaggctcttaact

SEQ ID NO: 44342 - RNA, 21 nt, RNAi
gcuagccaggcucuuaacuuu

SEQ ID NO: 44343 - RNA, 21 nt, RNAi
uucgaucgguccgagaauuga

SEQ ID NO: 44344 - DNA, 21 bp, homo sapiens
aactgctgtgttgatgaagaa

SEQ ID NO: 44345 - RNA, 21 nt, RNAi
cugcuguguugaugaagaauu

SEQ ID NO: 44346 - RNA, 21 nt, RNAi
uugacgacacaacuacuucuu

SEQ ID NO: 44347 - DNA, 21 bp, homo sapiens
aagaagctgaagcagaaagac

SEQ ID NO: 44348 - RNA, 21 nt, RNAi
gaagcugaagcagaaagacuu

SEQ ID NO: 44349 - RNA, 21 nt, RNAi
uucuucgacuucgucuuucug

SEQ ID NO: 44350 - DNA, 21 bp, homo sapiens
aagctgaagcagaaagacttc

SEQ ID NO: 44351 - RNA, 21 nt, RNAi
gcugaagcagaaagacuucuu

SEQ ID NO: 44352 - RNA, 21 nt, RNAi
uucgacuucgucuuucugaag

SEQ ID NO: 44353 - DNA, 21 bp, homo sapiens
aagcagaaagacttcttctaa

SEQ ID NO: 44354 - RNA, 21 nt, RNAi
gcagaaagacuucuucuaauu

SEQ ID NO: 44355 - RNA, 21 nt, RNAi
uucgucuuucugaagaagauu

SEQ ID NO: 44356 - DNA, 21 bp, homo sapiens
aagacttcttctaattgcaac

SEQ ID NO: 44357 - RNA, 21 nt, RNAi
gacuucuucuaauugcaacuu

SEQ ID NO: 44358 - RNA, 21 nt, RNAi
uucugaagaagauuaacguug

SEQ ID NO: 44359 - DNA, 21 bp, homo sapiens
aaattgaagaacgaaggacct

SEQ ID NO: 44360 - RNA, 21 nt, RNAi
auugaagaacgaaggaccuuu

SEQ ID NO: 44361 - RNA, 21 nt, RNAi
uuuaacuucuugcuuccugga

SEQ ID NO: 44362 - DNA, 21 bp, homo sapiens
aattgaagaacgaaggacctc

SEQ ID NO: 44363 - RNA, 21 nt, RNAi
uugaagaacgaaggaccucuu

SEQ ID NO: 44364 - RNA, 21 nt, RNAi
uuaacuucuugcuuccuggag

SEQ ID NO: 44365 - DNA, 21 bp, homo sapiens
aagaacgaaggacctcagagg

SEQ ID NO: 44366 - RNA, 21 nt, RNAi
gaacgaaggaccucagagguu

SEQ ID NO: 44367 - RNA, 21 nt, RNAi
uucuugcuuccuggagucucc

SEQ ID NO: 44368 - DNA, 21 bp, homo sapiens
aacgaaggacctcagaggaag

SEQ ID NO: 44369 - RNA, 21 nt, RNAi
cgaaggaccucagaggaaguu

SEQ ID NO: 44370 - RNA, 21 nt, RNAi
uugcuuccuggagucuccuuc

SEQ ID NO: 44371 - DNA, 21 bp, homo sapiens
aaggacctcagaggaagaata

SEQ ID NO: 44372 - RNA, 21 nt, RNAi
ggaccucagaggaagaauauu

SEQ ID NO: 44373 - RNA, 21 nt, RNAi
uuccuggagucuccuucuuau

SEQ ID NO: 44374 - DNA, 21 bp, homo sapiens
aaagtgaatttatgccatcca

SEQ ID NO: 44375 - RNA, 21 nt, RNAi
agugaauuuaugccauccauu

SEQ ID NO: 44376 - RNA, 21 nt, RNAi
uuucacuuaaauacgguaggu

SEQ ID NO: 44377 - DNA, 21 bp, homo sapiens
aagtgaatttatgccatccaa

SEQ ID NO: 44378 - RNA, 21 nt, RNAi
gugaauuuaugccauccaauu

SEQ ID NO: 44379 - RNA, 21 nt, RNAi
uucacuuaaauacgguagguu

SEQ ID NO: 44380 - DNA, 21 bp, homo sapiens
aatttatgccatccaaaggat

SEQ ID NO: 44381 - RNA, 21 nt, RNAi
uuuaugccauccaaaggauuu

SEQ ID NO: 44382 - RNA, 21 nt, RNAi
uuaaauacgguagguuuccua

SEQ ID NO: 44383 - DNA, 21 bp, homo sapiens
aaaggatcagttactttgtca

SEQ ID NO: 44384 - RNA, 21 nt, RNAi
aggaucaguuacuuugucauu

SEQ ID NO: 44385 - RNA, 21 nt, RNAi
uuuccuagucaaugaaacagu

SEQ ID NO: 44386 - DNA, 21 bp, homo sapiens
aaggatcagttactttgtcag

SEQ ID NO: 44387 - RNA, 21 nt, RNAi
ggaucaguuacuuugucaguu

SEQ ID NO: 44388 - RNA, 21 nt, RNAi
uuccuagucaaugaaacaguc

SEQ ID NO: 44389 - DNA, 21 bp, homo sapiens
aaaccagatgcagcaaattac

SEQ ID NO: 44390 - RNA, 21 nt, RNAi
accagaugcagcaaauuacuu

SEQ ID NO: 44391 - RNA, 21 nt, RNAi
uuuggucuacgucguuuaaug

SEQ ID NO: 44392 - DNA, 21 bp, homo sapiens
aaccagatgcagcaaattact

SEQ ID NO: 44393 - RNA, 21 nt, RNAi
ccagaugcagcaaauuacuuu

SEQ ID NO: 44394 - RNA, 21 nt, RNAi
uuggucuacgucguuuaauga

SEQ ID NO: 44395 - DNA, 21 bp, homo sapiens
aaatatggtagccacaccatt

SEQ ID NO: 44396 - RNA, 21 nt, RNAi
auaugguagccacaccauuuu

SEQ ID NO: 44397 - RNA, 21 nt, RNAi
uuuauaccaucggugugguaa

SEQ ID NO: 44398 - DNA, 21 bp, homo sapiens
aatatggtagccacaccatta

SEQ ID NO: 44399 - RNA, 21 nt, RNAi
uaugguagccacaccauuauu

SEQ ID NO: 44400 - RNA, 21 nt, RNAi
uuauaccaucggugugguaau

SEQ ID NO: 44401 - DNA, 21 bp, homo sapiens
aaactctcttaacggtgatgc

SEQ ID NO: 44402 - RNA, 21 nt, RNAi
acucucuuaacggugaugcuu

SEQ ID NO: 44403 - RNA, 21 nt, RNAi
uuugagagaauugccacuacg

SEQ ID NO: 44404 - DNA, 21 bp, homo sapiens
aactctcttaacggtgatgct

SEQ ID NO: 44405 - RNA, 21 nt, RNAi
cucucuuaacggugaugcuuu

SEQ ID NO: 44406 - RNA, 21 nt, RNAi
uugagagaauugccacuacga

SEQ ID NO: 44407 - DNA, 21 bp, homo sapiens
aacggtgatgctctgacattc

SEQ ID NO: 44408 - RNA, 21 nt, RNAi
cggugaugcucugacauucuu

SEQ ID NO: 44409 - RNA, 21 nt, RNAi
uugccacuacgagacuguaag

SEQ ID NO: 44410 - DNA, 21 bp, homo sapiens
aagatgtatccaatgactttg

SEQ ID NO: 44411 - RNA, 21 nt, RNAi
gauguauccaaugacuuuguu

SEQ ID NO: 44412 - RNA, 21 nt, RNAi
uucuacauagguuacugaaac

SEQ ID NO: 44413 - DNA, 21 bp, homo sapiens
aagtttacagcttggtgcaaa

SEQ ID NO: 44414 - RNA, 21 nt, RNAi
guuuacagcuuggugcaaauu

SEQ ID NO: 44415 - RNA, 21 nt, RNAi
uucaaaugucgaaccacguuu

SEQ ID NO: 44416 - DNA, 21 bp, homo sapiens
aaacatccaagtccaaggcta

SEQ ID NO: 44417 - RNA, 21 nt, RNAi
acauccaaguccaaggcuauu

SEQ ID NO: 44418 - RNA, 21 nt, RNAi
uuuguagguucagguuccgau

SEQ ID NO: 44419 - DNA, 21 bp, homo sapiens
aacatccaagtccaaggctat

SEQ ID NO: 44420 - RNA, 21 nt, RNAi
cauccaaguccaaggcuauuu

SEQ ID NO: 44421 - RNA, 21 nt, RNAi
uuguagguucagguuccgaua

SEQ ID NO: 44422 - DNA, 21 bp, homo sapiens
aagtccaaggctattactcca

SEQ ID NO: 44423 - RNA, 21 nt, RNAi
guccaaggcuauuacuccauu

SEQ ID NO: 44424 - RNA, 21 nt, RNAi
uucagguuccgauaaugaggu

SEQ ID NO: 44425 - DNA, 21 bp, homo sapiens
aaggctattactccaaagcga

SEQ ID NO: 44426 - RNA, 21 nt, RNAi
ggcuauuacuccaaagcgauu

SEQ ID NO: 44427 - RNA, 21 nt, RNAi
uuccgauaaugagguuucgcu

SEQ ID NO: 44428 - DNA, 21 bp, homo sapiens
aaagcgactcctcacatctat

SEQ ID NO: 44429 - RNA, 21 nt, RNAi
agcgacuccucacaucuauuu

SEQ ID NO: 44430 - RNA, 21 nt, RNAi
uuucgcugaggaguguagaua

SEQ ID NO: 44431 - DNA, 21 bp, homo sapiens
aagcgactcctcacatctata

SEQ ID NO: 44432 - RNA, 21 nt, RNAi
gcgacuccucacaucuauauu

SEQ ID NO: 44433 - RNA, 21 nt, RNAi
uucgcugaggaguguagauau

SEQ ID NO: 44434 - DNA, 21 bp, homo sapiens
aaagcaacattcattcttcag

SEQ ID NO: 44435 - RNA, 21 nt, RNAi
agcaacauucauucuucaguu

SEQ ID NO: 44436 - RNA, 21 nt, RNAi
uuucguuguaaguaagaaguc

SEQ ID NO: 44437 - DNA, 21 bp, homo sapiens
aagcaacattcattcttcagt

SEQ ID NO: 44438 - RNA, 21 nt, RNAi
gcaacauucauucuucaguuu

SEQ ID NO: 44439 - RNA, 21 nt, RNAi
uucguuguaaguaagaaguca

SEQ ID NO: 44440 - DNA, 21 bp, homo sapiens
aacattcattcttcagtcatg

SEQ ID NO: 44441 - RNA, 21 nt, RNAi
cauucauucuucagucauguu

SEQ ID NO: 44442 - RNA, 21 nt, RNAi
uuguaaguaagaagucaguac

SEQ ID NO: 44443 - DNA, 21 bp, homo sapiens
aatactaagtttgttctggac

SEQ ID NO: 44444 - RNA, 21 nt, RNAi
uacuaaguuuguucuggacuu

SEQ ID NO: 44445 - RNA, 21 nt, RNAi
uuaugauucaaacaagaccug

SEQ ID NO: 44446 - DNA, 21 bp, homo sapiens
aagtttgttctggacaaggtc

SEQ ID NO: 44447 - RNA, 21 nt, RNAi
guuuguucuggacaaggucuu

SEQ ID NO: 44448 - RNA, 21 nt, RNAi
uucaaacaagaccuguuccag

SEQ ID NO: 44449 - DNA, 21 bp, homo sapiens
aaatgtcaagtgaattccagt

SEQ ID NO: 44450 - RNA, 21 nt, RNAi
augucaagugaauuccaguuu

SEQ ID NO: 44451 - RNA, 21 nt, RNAi
uuuacaguucacuuaagguca

SEQ ID NO: 44452 - DNA, 21 bp, homo sapiens
aatgtcaagtgaattccagtg

SEQ ID NO: 44453 - RNA, 21 nt, RNAi
ugucaagugaauuccaguguu

SEQ ID NO: 44454 - RNA, 21 nt, RNAi
uuacaguucacuuaaggucac

SEQ ID NO: 44455 - DNA, 21 bp, homo sapiens
aagtgaattccagtgttgaag

SEQ ID NO: 44456 - RNA, 21 nt, RNAi
gugaauuccaguguugaaguu

SEQ ID NO: 44457 - RNA, 21 nt, RNAi
uucacuuaaggucacaacuuc

SEQ ID NO: 44458 - DNA, 21 bp, homo sapiens
aattccagtgttgaagaaaga

SEQ ID NO: 44459 - RNA, 21 nt, RNAi
uuccaguguugaagaaagauu

SEQ ID NO: 44460 - RNA, 21 nt, RNAi
uuaaggucacaacuucuuucu

SEQ ID NO: 44461 - DNA, 21 bp, homo sapiens
aagatggtgtgttctttctgg

SEQ ID NO: 44462 - RNA, 21 nt, RNAi
gaugguguguucuuucugguu

SEQ ID NO: 44463 - RNA, 21 nt, RNAi
uucuaccacacaagaaagacc

SEQ ID NO: 44464 - DNA, 21 bp, homo sapiens
aaggataaatctggctaattg

SEQ ID NO: 44465 - RNA, 21 nt, RNAi
ggauaaaucuggcuaauuguu

SEQ ID NO: 44466 - RNA, 21 nt, RNAi
uuccuauuuagaccgauuaac

SEQ ID NO: 44467 - DNA, 21 bp, homo sapiens
aaatctggctaattgtaccag

SEQ ID NO: 44468 - RNA, 21 nt, RNAi
aucuggcuaauuguaccaguu

SEQ ID NO: 44469 - RNA, 21 nt, RNAi
uuuagaccgauuaacaugguc

SEQ ID NO: 44470 - DNA, 21 bp, homo sapiens
aatctggctaattgtaccagt

SEQ ID NO: 44471 - RNA, 21 nt, RNAi
ucuggcuaauuguaccaguuu

SEQ ID NO: 44472 - RNA, 21 nt, RNAi
uuagaccgauuaacaugguca

SEQ ID NO: 44473 - DNA, 21 bp, homo sapiens
aattgtaccagtcgtcagata

SEQ ID NO: 44474 - RNA, 21 nt, RNAi
uuguaccagucgucagauauu

SEQ ID NO: 44475 - RNA, 21 nt, RNAi
uuaacauggucagcagucuau

SEQ ID NO: 44476 - DNA, 21 bp, homo sapiens
aattaattactgtccgaccac

SEQ ID NO: 44477 - RNA, 21 nt, RNAi
uuaauuacuguccgaccacuu

SEQ ID NO: 44478 - RNA, 21 nt, RNAi
uuaauuaaugacaggcuggug

SEQ ID NO: 44479 - DNA, 21 bp, homo sapiens
aattactgtccgaccacaaag

SEQ ID NO: 44480 - RNA, 21 nt, RNAi
uuacuguccgaccacaaaguu

SEQ ID NO: 44481 - RNA, 21 nt, RNAi
uuaaugacaggcugguguuuc

SEQ ID NO: 44482 - DNA, 21 bp, homo sapiens
aaagagaagatgaccgagaga

SEQ ID NO: 44483 - RNA, 21 nt, RNAi
agagaagaugaccgagagauu

SEQ ID NO: 44484 - RNA, 21 nt, RNAi
uuucucuucuacuggcucucu

SEQ ID NO: 44485 - DNA, 21 bp, homo sapiens
aagagaagatgaccgagagac

SEQ ID NO: 44486 - RNA, 21 nt, RNAi
gagaagaugaccgagagacuu

SEQ ID NO: 44487 - RNA, 21 nt, RNAi
uucucuucuacuggcucucug

SEQ ID NO: 44488 - DNA, 21 bp, homo sapiens
aagatgaccgagagactcttg

SEQ ID NO: 44489 - RNA, 21 nt, RNAi
gaugaccgagagacucuuguu

SEQ ID NO: 44490 - RNA, 21 nt, RNAi
uucuacuggcucucugagaac

SEQ ID NO: 44491 - DNA, 21 bp, homo sapiens
aagaactggctgtctgcagat

SEQ ID NO: 44492 - RNA, 21 nt, RNAi
gaacuggcugucugcagauuu

SEQ ID NO: 44493 - RNA, 21 nt, RNAi
uucuugaccgacagacgucua

SEQ ID NO: 44494 - DNA, 21 bp, homo sapiens
aactggctgtctgcagatact

SEQ ID NO: 44495 - RNA, 21 nt, RNAi
cuggcugucugcagauacuuu

SEQ ID NO: 44496 - RNA, 21 nt, RNAi
uugaccgacagacgucuauga

SEQ ID NO: 44497 - DNA, 21 bp, homo sapiens
aactcaatcaagttcttgttg

SEQ ID NO: 44498 - RNA, 21 nt, RNAi
cucaaucaaguucuuguuguu

SEQ ID NO: 44499 - RNA, 21 nt, RNAi
uugaguuaguucaagaacaac

SEQ ID NO: 44500 - DNA, 21 bp, homo sapiens
aagttcttgttgatattcgcc

SEQ ID NO: 44501 - RNA, 21 nt, RNAi
guucuuguugauauucgccuu

SEQ ID NO: 44502 - RNA, 21 nt, RNAi
uucaagaacaacuauaagcgg

SEQ ID NO: 44503 - DNA, 21 bp, homo sapiens
aacctgatgcttgctacaaac

SEQ ID NO: 44504 - RNA, 21 nt, RNAi
ccugaugcuugcuacaaacuu

SEQ ID NO: 44505 - RNA, 21 nt, RNAi
uuggacuacgaacgauguuug

SEQ ID NO: 44506 - DNA, 21 bp, homo sapiens
aaacctattggaaagccttaa

SEQ ID NO: 44507 - RNA, 21 nt, RNAi
accuauuggaaagccuuaauu

SEQ ID NO: 44508 - RNA, 21 nt, RNAi
uuuggauaaccuuucggaauu

SEQ ID NO: 44509 - DNA, 21 bp, homo sapiens
aacctattggaaagccttaaa

SEQ ID NO: 44510 - RNA, 21 nt, RNAi
ccuauuggaaagccuuaaauu

SEQ ID NO: 44511 - RNA, 21 nt, RNAi
uuggauaaccuuucggaauuu

SEQ ID NO: 44512 - DNA, 21 bp, homo sapiens
aaatttccatgctatctagag

SEQ ID NO: 44513 - RNA, 21 nt, RNAi
auuuccaugcuaucuagaguu

SEQ ID NO: 44514 - RNA, 21 nt, RNAi
uuuaaagguacgauagaucuc

SEQ ID NO: 44515 - DNA, 21 bp, homo sapiens
aatttccatgctatctagagg

SEQ ID NO: 44516 - RNA, 21 nt, RNAi
uuuccaugcuaucuagagguu

SEQ ID NO: 44517 - RNA, 21 nt, RNAi
uuaaagguacgauagaucucc

SEQ ID NO: 44518 - DNA, 21 bp, homo sapiens
aagaaacacacttaagagcat

SEQ ID NO: 44519 - RNA, 21 nt, RNAi
gaaacacacuuaagagcauuu

SEQ ID NO: 44520 - RNA, 21 nt, RNAi
uucuuugugugaauucucgua

SEQ ID NO: 44521 - DNA, 21 bp, homo sapiens
aaacacacttaagagcatcag

SEQ ID NO: 44522 - RNA, 21 nt, RNAi
acacacuuaagagcaucaguu

SEQ ID NO: 44523 - RNA, 21 nt, RNAi
uuugugugaauucucguaguc

SEQ ID NO: 44524 - DNA, 21 bp, homo sapiens
aacacacttaagagcatcaga

SEQ ID NO: 44525 - RNA, 21 nt, RNAi
cacacuuaagagcaucagauu

SEQ ID NO: 44526 - RNA, 21 nt, RNAi
uugugugaauucucguagucu

SEQ ID NO: 44527 - DNA, 21 bp, homo sapiens
aagagcatcagatttactgat

SEQ ID NO: 44528 - RNA, 21 nt, RNAi
gagcaucagauuuacugauuu

SEQ ID NO: 44529 - RNA, 21 nt, RNAi
uucucguagucuaaaugacua

SEQ ID NO: 44530 - DNA, 21 bp, homo sapiens
aactgatttctgtcattcatc

SEQ ID NO: 44531 - RNA, 21 nt, RNAi
cugauuucugucauucaucuu

SEQ ID NO: 44532 - RNA, 21 nt, RNAi
uugacuaaagacaguaaguag

SEQ ID NO: 44533 - DNA, 21 bp, homo sapiens
aagaaattctgagttgtcttc

SEQ ID NO: 44534 - RNA, 21 nt, RNAi
gaaauucugaguugucuucuu

SEQ ID NO: 44535 - RNA, 21 nt, RNAi
uucuuuaagacucaacagaag

SEQ ID NO: 44536 - DNA, 21 bp, homo sapiens
aaattctgagttgtcttcttg

SEQ ID NO: 44537 - RNA, 21 nt, RNAi
auucugaguugucuucuuguu

SEQ ID NO: 44538 - RNA, 21 nt, RNAi
uuuaagacucaacagaagaac

SEQ ID NO: 44539 - DNA, 21 bp, homo sapiens
aattctgagttgtcttcttgg

SEQ ID NO: 44540 - RNA, 21 nt, RNAi
uucugaguugucuucuugguu

SEQ ID NO: 44541 - RNA, 21 nt, RNAi
uuaagacucaacagaagaacc

SEQ ID NO: 44542 - DNA, 21 bp, homo sapiens
aaaggctgtgatcatttattg

SEQ ID NO: 44543 - RNA, 21 nt, RNAi
aggcugugaucauuuauuguu

SEQ ID NO: 44544 - RNA, 21 nt, RNAi
uuuccgacacuaguaaauaac

SEQ ID NO: 44545 - DNA, 21 bp, homo sapiens
aaggctgtgatcatttattga

SEQ ID NO: 44546 - RNA, 21 nt, RNAi
ggcugugaucauuuauugauu

SEQ ID NO: 44547 - RNA, 21 nt, RNAi
uuccgacacuaguaaauaacu

SEQ ID NO: 44548 - DNA, 21 bp, homo sapiens
aaatgtctaaggcctttacag

SEQ ID NO: 44549 - RNA, 21 nt, RNAi
augucuaaggccuuuacaguu

SEQ ID NO: 44550 - RNA, 21 nt, RNAi
uuuacagauuccggaaauguc

SEQ ID NO: 44551 - DNA, 21 bp, homo sapiens
aatgtctaaggcctttacaga

SEQ ID NO: 44552 - RNA, 21 nt, RNAi
ugucuaaggccuuuacagauu

SEQ ID NO: 44553 - RNA, 21 nt, RNAi
uuacagauuccggaaaugucu

SEQ ID NO: 44554 - DNA, 21 bp, homo sapiens
aaggcctttacagaaacattt

SEQ ID NO: 44555 - RNA, 21 nt, RNAi
ggccuuuacagaaacauuuuu

SEQ ID NO: 44556 - RNA, 21 nt, RNAi
uuccggaaaugucuuuguaaa

SEQ ID NO: 44557 - DNA, 21 bp, homo sapiens
caggagacacactgagctgag

SEQ ID NO: 44558 - RNA, 21 nt, RNAi
ggagacacacugagcugaguu

SEQ ID NO: 44559 - RNA, 21 nt, RNAi
uuccucugugugacucgacuc

SEQ ID NO: 44560 - DNA, 21 bp, homo sapiens
cacactgagctgagactcact

SEQ ID NO: 44561 - RNA, 21 nt, RNAi
cacugagcugagacucacuuu

SEQ ID NO: 44562 - RNA, 21 nt, RNAi
uugugacucgacucugaguga

SEQ ID NO: 44563 - DNA, 21 bp, homo sapiens
cactgagctgagactcacttt

SEQ ID NO: 44564 - RNA, 21 nt, RNAi
cugagcugagacucacuuuuu

SEQ ID NO: 44565 - RNA, 21 nt, RNAi
uugacucgacucugagugaaa

SEQ ID NO: 44566 - DNA, 21 bp, homo sapiens
caccgtttccatcgtctcgta

SEQ ID NO: 44567 - RNA, 21 nt, RNAi
ccguuuccaucgucucguauu

SEQ ID NO: 44568 - RNA, 21 nt, RNAi
uuggcaaagguagcagagcau

SEQ ID NO: 44569 - DNA, 21 bp, homo sapiens
catcgtctcgtagtccgacgc

SEQ ID NO: 44570 - RNA, 21 nt, RNAi
ucgucucguaguccgacgcuu

SEQ ID NO: 44571 - RNA, 21 nt, RNAi
uuagcagagcaucaggcugcg

SEQ ID NO: 44572 - DNA, 21 bp, homo sapiens
caggcgagagaatcttcagag

SEQ ID NO: 44573 - RNA, 21 nt, RNAi
ggcgagagaaucuucagaguu

SEQ ID NO: 44574 - RNA, 21 nt, RNAi
uuccgcucucuuagaagucuc

SEQ ID NO: 44575 - DNA, 21 bp, homo sapiens
cacagcagctccaaggtctat

SEQ ID NO: 44576 - RNA, 21 nt, RNAi
cagcagcuccaaggucuauuu

SEQ ID NO: 44577 - RNA, 21 nt, RNAi
uugucgucgagguuccagaua

SEQ ID NO: 44578 - DNA, 21 bp, homo sapiens
cagcagctccaaggtctatga

SEQ ID NO: 44579 - RNA, 21 nt, RNAi
gcagcuccaaggucuaugauu

SEQ ID NO: 44580 - RNA, 21 nt, RNAi
uucgucgagguuccagauacu

SEQ ID NO: 44581 - DNA, 21 bp, homo sapiens
cagctccaaggtctatgactc

SEQ ID NO: 44582 - RNA, 21 nt, RNAi
gcuccaaggucuaugacucuu

SEQ ID NO: 44583 - RNA, 21 nt, RNAi
uucgagguuccagauacugag

SEQ ID NO: 44584 - DNA, 21 bp, homo sapiens
caaggtctatgactcatgcta

SEQ ID NO: 44585 - RNA, 21 nt, RNAi
aggucuaugacucaugcuauu

SEQ ID NO: 44586 - RNA, 21 nt, RNAi
uuuccagauacugaguacgau

SEQ ID NO: 44587 - DNA, 21 bp, homo sapiens
catgctaagcgagctagacag

SEQ ID NO: 44588 - RNA, 21 nt, RNAi
ugcuaagcgagcuagacaguu

SEQ ID NO: 44589 - RNA, 21 nt, RNAi
uuacgauucgcucgaucuguc

SEQ ID NO: 44590 - DNA, 21 bp, homo sapiens
cagccactttcagaagcaagt

SEQ ID NO: 44591 - RNA, 21 nt, RNAi
gccacuuucagaagcaaguuu

SEQ ID NO: 44592 - RNA, 21 nt, RNAi
uucggugaaagucuucguuca

SEQ ID NO: 44593 - DNA, 21 bp, homo sapiens
cactttcagaagcaagtaacc

SEQ ID NO: 44594 - RNA, 21 nt, RNAi
cuuucagaagcaaguaaccuu

SEQ ID NO: 44595 - RNA, 21 nt, RNAi
uugaaagucuucguucauugg

SEQ ID NO: 44596 - DNA, 21 bp, homo sapiens
cagaagcaagtaaccagcagc

SEQ ID NO: 44597 - RNA, 21 nt, RNAi
gaagcaaguaaccagcagcuu

SEQ ID NO: 44598 - RNA, 21 nt, RNAi
uucuucguucauuggucgucg

SEQ ID NO: 44599 - DNA, 21 bp, homo sapiens
caacactgaagtagaagtttc

SEQ ID NO: 44600 - RNA, 21 nt, RNAi
acacugaaguagaaguuucuu

SEQ ID NO: 44601 - RNA, 21 nt, RNAi
uuugugacuucaucuucaaag

SEQ ID NO: 44602 - DNA, 21 bp, homo sapiens
cactgaagtagaagtttctaa

SEQ ID NO: 44603 - RNA, 21 nt, RNAi
cugaaguagaaguuucuaauu

SEQ ID NO: 44604 - RNA, 21 nt, RNAi
uugacuucaucuucaaagauu

SEQ ID NO: 44605 - DNA, 21 bp, homo sapiens
caaccagttgagtcgacatct

SEQ ID NO: 44606 - RNA, 21 nt, RNAi
accaguugagucgacaucuuu

SEQ ID NO: 44607 - RNA, 21 nt, RNAi
uuuggucaacucagcuguaga

SEQ ID NO: 44608 - DNA, 21 bp, homo sapiens
cagttgagtcgacatctgcaa

SEQ ID NO: 44609 - RNA, 21 nt, RNAi
guugagucgacaucugcaauu

SEQ ID NO: 44610 - RNA, 21 nt, RNAi
uucaacucagcuguagacguu

SEQ ID NO: 44611 - DNA, 21 bp, homo sapiens
caagtcctgtgtctcctcagg

SEQ ID NO: 44612 - RNA, 21 nt, RNAi
aguccugugucuccucagguu

SEQ ID NO: 44613 - RNA, 21 nt, RNAi
uuucaggacacagaggagucc

SEQ ID NO: 44614 - DNA, 21 bp, homo sapiens
caggtgcagccacaagcagca

SEQ ID NO: 44615 - RNA, 21 nt, RNAi
ggugcagccacaagcagcauu

SEQ ID NO: 44616 - RNA, 21 nt, RNAi
uuccacgucgguguucgucgu

SEQ ID NO: 44617 - DNA, 21 bp, homo sapiens
cagccacaagcagcagatacc

SEQ ID NO: 44618 - RNA, 21 nt, RNAi
gccacaagcagcagauaccuu

SEQ ID NO: 44619 - RNA, 21 nt, RNAi
uucgguguucgucgucuaugg

SEQ ID NO: 44620 - DNA, 21 bp, homo sapiens
cacaagcagcagataccatca

SEQ ID NO: 44621 - RNA, 21 nt, RNAi
caagcagcagauaccaucauu

SEQ ID NO: 44622 - RNA, 21 nt, RNAi
uuguucgucgucuaugguagu

SEQ ID NO: 44623 - DNA, 21 bp, homo sapiens
caagcagcagataccatcagt

SEQ ID NO: 44624 - RNA, 21 nt, RNAi
agcagcagauaccaucaguuu

SEQ ID NO: 44625 - RNA, 21 nt, RNAi
uuucgucgucuaugguaguca

SEQ ID NO: 44626 - DNA, 21 bp, homo sapiens
cagcagataccatcagtgatt

SEQ ID NO: 44627 - RNA, 21 nt, RNAi
gcagauaccaucagugauuuu

SEQ ID NO: 44628 - RNA, 21 nt, RNAi
uucgucuaugguagucacuaa

SEQ ID NO: 44629 - DNA, 21 bp, homo sapiens
cagataccatcagtgattctg

SEQ ID NO: 44630 - RNA, 21 nt, RNAi
gauaccaucagugauucuguu

SEQ ID NO: 44631 - RNA, 21 nt, RNAi
uucuaugguagucacuaagac

SEQ ID NO: 44632 - DNA, 21 bp, homo sapiens
catcagtgattctgttgctgt

SEQ ID NO: 44633 - RNA, 21 nt, RNAi
ucagugauucuguugcuguuu

SEQ ID NO: 44634 - RNA, 21 nt, RNAi
uuagucacuaagacaacgaca

SEQ ID NO: 44635 - DNA, 21 bp, homo sapiens
caagattggaagcaactgcag

SEQ ID NO: 44636 - RNA, 21 nt, RNAi
agauuggaagcaacugcaguu

SEQ ID NO: 44637 - RNA, 21 nt, RNAi
uuucuaaccuucguugacguc

SEQ ID NO: 44638 - DNA, 21 bp, homo sapiens
caactgcagcctcctcagtta

SEQ ID NO: 44639 - RNA, 21 nt, RNAi
acugcagccuccucaguuauu

SEQ ID NO: 44640 - RNA, 21 nt, RNAi
uuugacgucggaggagucaau

SEQ ID NO: 44641 - DNA, 21 bp, homo sapiens
cagatgacattcctgaaagct

SEQ ID NO: 44642 - RNA, 21 nt, RNAi
gaugacauuccugaaagcuuu

SEQ ID NO: 44643 - RNA, 21 nt, RNAi
uucuacuguaaggacuuucga

SEQ ID NO: 44644 - DNA, 21 bp, homo sapiens
cattcctgaaagctcactctt

SEQ ID NO: 44645 - RNA, 21 nt, RNAi
uuccugaaagcucacucuuuu

SEQ ID NO: 44646 - RNA, 21 nt, RNAi
uuaaggacuuucgagugagaa

SEQ ID NO: 44647 - DNA, 21 bp, homo sapiens
cactcttctcaccaatgccat

SEQ ID NO: 44648 - RNA, 21 nt, RNAi
cucuucucaccaaugccauuu

SEQ ID NO: 44649 - RNA, 21 nt, RNAi
uugagaagagugguuacggua

SEQ ID NO: 44650 - DNA, 21 bp, homo sapiens
caccaatgccatcagaggaaa

SEQ ID NO: 44651 - RNA, 21 nt, RNAi
ccaaugccaucagaggaaauu

SEQ ID NO: 44652 - RNA, 21 nt, RNAi
uugguuacgguagucuccuuu

SEQ ID NO: 44653 - DNA, 21 bp, homo sapiens
caaacctctgctttcaaatgc

SEQ ID NO: 44654 - RNA, 21 nt, RNAi
aaccucugcuuucaaaugcuu

SEQ ID NO: 44655 - RNA, 21 nt, RNAi
uuuuggagacgaaaguuuacg

SEQ ID NO: 44656 - DNA, 21 bp, homo sapiens
caaatgcctcggcaactccag

SEQ ID NO: 44657 - RNA, 21 nt, RNAi
aaugccucggcaacuccaguu

SEQ ID NO: 44658 - RNA, 21 nt, RNAi
uuuuacggagccguugagguc

SEQ ID NO: 44659 - DNA, 21 bp, homo sapiens
caatcttgccgcaactatttg

SEQ ID NO: 44660 - RNA, 21 nt, RNAi
aucuugccgcaacuauuuguu

SEQ ID NO: 44661 - RNA, 21 nt, RNAi
uuuagaacggcguugauaaac

SEQ ID NO: 44662 - DNA, 21 bp, homo sapiens
cagtgtacaagaacagcctgg

SEQ ID NO: 44663 - RNA, 21 nt, RNAi
guguacaagaacagccugguu

SEQ ID NO: 44664 - RNA, 21 nt, RNAi
uucacauguucuugucggacc

SEQ ID NO: 44665 - DNA, 21 bp, homo sapiens
caagaacagcctggtaccgct

SEQ ID NO: 44666 - RNA, 21 nt, RNAi
agaacagccugguaccgcuuu

SEQ ID NO: 44667 - RNA, 21 nt, RNAi
uuucuugucggaccauggcga

SEQ ID NO: 44668 - DNA, 21 bp, homo sapiens
cagcctggtaccgcttgttta

SEQ ID NO: 44669 - RNA, 21 nt, RNAi
gccugguaccgcuuguuuauu

SEQ ID NO: 44670 - RNA, 21 nt, RNAi
uucggaccauggcgaacaaau

SEQ ID NO: 44671 - DNA, 21 bp, homo sapiens
caagtggagcatctgctagga

SEQ ID NO: 44672 - RNA, 21 nt, RNAi
aguggagcaucugcuaggauu

SEQ ID NO: 44673 - RNA, 21 nt, RNAi
uuucaccucguagacgauccu

SEQ ID NO: 44674 - DNA, 21 bp, homo sapiens
catctgctaggatcaatagca

SEQ ID NO: 44675 - RNA, 21 nt, RNAi
ucugcuaggaucaauagcauu

SEQ ID NO: 44676 - RNA, 21 nt, RNAi
uuagacgauccuaguuaucgu

SEQ ID NO: 44677 - DNA, 21 bp, homo sapiens
caatagcagcagtgttaagca

SEQ ID NO: 44678 - RNA, 21 nt, RNAi
auagcagcaguguuaagcauu

SEQ ID NO: 44679 - RNA, 21 nt, RNAi
uuuaucgucgucacaauucgu

SEQ ID NO: 44680 - DNA, 21 bp, homo sapiens
cagcagtgttaagcaggaagc

SEQ ID NO: 44681 - RNA, 21 nt, RNAi
gcaguguuaagcaggaagcuu

SEQ ID NO: 44682 - RNA, 21 nt, RNAi
uucgucacaauucguccuucg

SEQ ID NO: 44683 - DNA, 21 bp, homo sapiens
cagtgttaagcaggaagctac

SEQ ID NO: 44684 - RNA, 21 nt, RNAi
guguuaagcaggaagcuacuu

SEQ ID NO: 44685 - RNA, 21 nt, RNAi
uucacaauucguccuucgaug

SEQ ID NO: 44686 - DNA, 21 bp, homo sapiens
caggaagctacattctgttcc

SEQ ID NO: 44687 - RNA, 21 nt, RNAi
ggaagcuacauucuguuccuu

SEQ ID NO: 44688 - RNA, 21 nt, RNAi
uuccuucgauguaagacaagg

SEQ ID NO: 44689 - DNA, 21 bp, homo sapiens
caagtgctgatgatgcgtctt

SEQ ID NO: 44690 - RNA, 21 nt, RNAi
agugcugaugaugcgucuuuu

SEQ ID NO: 44691 - RNA, 21 nt, RNAi
uuucacgacuacuacgcagaa

SEQ ID NO: 44692 - DNA, 21 bp, homo sapiens
caatttccagctctgtgaaag

SEQ ID NO: 44693 - RNA, 21 nt, RNAi
auuuccagcucugugaaaguu

SEQ ID NO: 44694 - RNA, 21 nt, RNAi
uuuaaaggucgagacacuuuc

SEQ ID NO: 44695 - DNA, 21 bp, homo sapiens
cagctctgtgaaagctacttc

SEQ ID NO: 44696 - RNA, 21 nt, RNAi
gcucugugaaagcuacuucuu

SEQ ID NO: 44697 - RNA, 21 nt, RNAi
uucgagacacuuucgaugaag

SEQ ID NO: 44698 - DNA, 21 bp, homo sapiens
cagtgaaatctactacatcta

SEQ ID NO: 44699 - RNA, 21 nt, RNAi
gugaaaucuacuacaucuauu

SEQ ID NO: 44700 - RNA, 21 nt, RNAi
uucacuuuagaugauguagau

SEQ ID NO: 44701 - DNA, 21 bp, homo sapiens
caatctaaagacaaatctacg

SEQ ID NO: 44702 - RNA, 21 nt, RNAi
aucuaaagacaaaucuacguu

SEQ ID NO: 44703 - RNA, 21 nt, RNAi
uuuagauuucuguuuagaugc

SEQ ID NO: 44704 - DNA, 21 bp, homo sapiens
caaatctacgacaccaggagg

SEQ ID NO: 44705 - RNA, 21 nt, RNAi
aaucuacgacaccaggagguu

SEQ ID NO: 44706 - RNA, 21 nt, RNAi
uuuuagaugcugugguccucc

SEQ ID NO: 44707 - DNA, 21 bp, homo sapiens
caccaggaggaacaggaatta

SEQ ID NO: 44708 - RNA, 21 nt, RNAi
ccaggaggaacaggaauuauu

SEQ ID NO: 44709 - RNA, 21 nt, RNAi
uugguccuccuuguccuuaau

SEQ ID NO: 44710 - DNA, 21 bp, homo sapiens
caggaggaacaggaattaagc

SEQ ID NO: 44711 - RNA, 21 nt, RNAi
ggaggaacaggaauuaagcuu

SEQ ID NO: 44712 - RNA, 21 nt, RNAi
uuccuccuuguccuuaauucg

SEQ ID NO: 44713 - DNA, 21 bp, homo sapiens
caggaattaagcctttcctgg

SEQ ID NO: 44714 - RNA, 21 nt, RNAi
ggaauuaagccuuuccugguu

SEQ ID NO: 44715 - RNA, 21 nt, RNAi
uuccuuaauucggaaaggacc

SEQ ID NO: 44716 - DNA, 21 bp, homo sapiens
caagaacatagcaaagaaagt

SEQ ID NO: 44717 - RNA, 21 nt, RNAi
agaacauagcaaagaaaguuu

SEQ ID NO: 44718 - RNA, 21 nt, RNAi
uuucuuguaucguuucuuuca

SEQ ID NO: 44719 - DNA, 21 bp, homo sapiens
catagcaaagaaagtccagct

SEQ ID NO: 44720 - RNA, 21 nt, RNAi
uagcaaagaaaguccagcuuu

SEQ ID NO: 44721 - RNA, 21 nt, RNAi
uuaucguuucuuucaggucga

SEQ ID NO: 44722 - DNA, 21 bp, homo sapiens
caaagaaagtccagctcgtag

SEQ ID NO: 44723 - RNA, 21 nt, RNAi
aagaaaguccagcucguaguu

SEQ ID NO: 44724 - RNA, 21 nt, RNAi
uuuucuuucaggucgagcauc

SEQ ID NO: 44725 - DNA, 21 bp, homo sapiens
caaatacaaaggccatccaag

SEQ ID NO: 44726 - RNA, 21 nt, RNAi
aauacaaaggccauccaaguu

SEQ ID NO: 44727 - RNA, 21 nt, RNAi
uuuuauguuuccgguagguuc

SEQ ID NO: 44728 - DNA, 21 bp, homo sapiens
caaaggccatccaagaaagat

SEQ ID NO: 44729 - RNA, 21 nt, RNAi
aaggccauccaagaaagauuu

SEQ ID NO: 44730 - RNA, 21 nt, RNAi
uuuuccgguagguucuuucua

SEQ ID NO: 44731 - DNA, 21 bp, homo sapiens
caagcaagacacatcttcatc

SEQ ID NO: 44732 - RNA, 21 nt, RNAi
agcaagacacaucuucaucuu

SEQ ID NO: 44733 - RNA, 21 nt, RNAi
uuucguucuguguagaaguag

SEQ ID NO: 44734 - DNA, 21 bp, homo sapiens
caagacacatcttcatctact

SEQ ID NO: 44735 - RNA, 21 nt, RNAi
agacacaucuucaucuacuuu

SEQ ID NO: 44736 - RNA, 21 nt, RNAi
uuucuguguagaaguagauga

SEQ ID NO: 44737 - DNA, 21 bp, homo sapiens
catttagcacaacagctcaag

SEQ ID NO: 44738 - RNA, 21 nt, RNAi
uuuagcacaacagcucaaguu

SEQ ID NO: 44739 - RNA, 21 nt, RNAi
uuaaaucguguugucgaguuc

SEQ ID NO: 44740 - DNA, 21 bp, homo sapiens
cacaacagctcaagcaggaac

SEQ ID NO: 44741 - RNA, 21 nt, RNAi
caacagcucaagcaggaacuu

SEQ ID NO: 44742 - RNA, 21 nt, RNAi
uuguugucgaguucguccuug

SEQ ID NO: 44743 - DNA, 21 bp, homo sapiens
caacagctcaagcaggaacgt

SEQ ID NO: 44744 - RNA, 21 nt, RNAi
acagcucaagcaggaacguuu

SEQ ID NO: 44745 - RNA, 21 nt, RNAi
uuugucgaguucguccuugca

SEQ ID NO: 44746 - DNA, 21 bp, homo sapiens
cagctcaagcaggaacgtcaa

SEQ ID NO: 44747 - RNA, 21 nt, RNAi
gcucaagcaggaacgucaauu

SEQ ID NO: 44748 - RNA, 21 nt, RNAi
uucgaguucguccuugcaguu

SEQ ID NO: 44749 - DNA, 21 bp, homo sapiens
catgtcttcgtggccgatttg

SEQ ID NO: 44750 - RNA, 21 nt, RNAi
ugucuucguggccgauuuguu

SEQ ID NO: 44751 - RNA, 21 nt, RNAi
uuacagaagcaccggcuaaac

SEQ ID NO: 44752 - DNA, 21 bp, homo sapiens
caaacaactagaaaccaaaca

SEQ ID NO: 44753 - RNA, 21 nt, RNAi
aacaacuagaaaccaaacauu

SEQ ID NO: 44754 - RNA, 21 nt, RNAi
uuuuguugaucuuugguuugu

SEQ ID NO: 44755 - DNA, 21 bp, homo sapiens
caactagaaaccaaacaggaa

SEQ ID NO: 44756 - RNA, 21 nt, RNAi
acuagaaaccaaacaggaauu

SEQ ID NO: 44757 - RNA, 21 nt, RNAi
uuugaucuuugguuuguccuu

SEQ ID NO: 44758 - DNA, 21 bp, homo sapiens
caaacaggaaactcactgtca

SEQ ID NO: 44759 - RNA, 21 nt, RNAi
aacaggaaacucacugucauu

SEQ ID NO: 44760 - RNA, 21 nt, RNAi
uuuuguccuuugagugacagu

SEQ ID NO: 44761 - DNA, 21 bp, homo sapiens
caggaaactcactgtcagagc

SEQ ID NO: 44762 - RNA, 21 nt, RNAi
ggaaacucacugucagagcuu

SEQ ID NO: 44763 - RNA, 21 nt, RNAi
uuccuuugagugacagucucg

SEQ ID NO: 44764 - DNA, 21 bp, homo sapiens
cagtcacttccagtaacagaa

SEQ ID NO: 44765 - RNA, 21 nt, RNAi
gucacuuccaguaacagaauu

SEQ ID NO: 44766 - RNA, 21 nt, RNAi
uucagugaaggucauugucuu

SEQ ID NO: 44767 - DNA, 21 bp, homo sapiens
cagtacagaacctaaaggttt

SEQ ID NO: 44768 - RNA, 21 nt, RNAi
guacagaaccuaaagguuuuu

SEQ ID NO: 44769 - RNA, 21 nt, RNAi
uucaugucuuggauuuccaaa

SEQ ID NO: 44770 - DNA, 21 bp, homo sapiens
cagaacctaaaggtttcactg

SEQ ID NO: 44771 - RNA, 21 nt, RNAi
gaaccuaaagguuucacuguu

SEQ ID NO: 44772 - RNA, 21 nt, RNAi
uucuuggauuuccaaagugac

SEQ ID NO: 44773 - DNA, 21 bp, homo sapiens
cactgaatgcgaaatgacgaa

SEQ ID NO: 44774 - RNA, 21 nt, RNAi
cugaaugcgaaaugacgaauu

SEQ ID NO: 44775 - RNA, 21 nt, RNAi
uugacuuacgcuuuacugcuu

SEQ ID NO: 44776 - DNA, 21 bp, homo sapiens
cagtgatgtcctagaggaagg

SEQ ID NO: 44777 - RNA, 21 nt, RNAi
gugauguccuagaggaagguu

SEQ ID NO: 44778 - RNA, 21 nt, RNAi
uucacuacaggaucuccuucc

SEQ ID NO: 44779 - DNA, 21 bp, homo sapiens
caagaggagatggatcaagca

SEQ ID NO: 44780 - RNA, 21 nt, RNAi
agaggagauggaucaagcauu

SEQ ID NO: 44781 - RNA, 21 nt, RNAi
uuucuccucuaccuaguucgu

SEQ ID NO: 44782 - DNA, 21 bp, homo sapiens
caagcattagcagaaagcagc

SEQ ID NO: 44783 - RNA, 21 nt, RNAi
agcauuagcagaaagcagcuu

SEQ ID NO: 44784 - RNA, 21 nt, RNAi
uuucguaaucgucuuucgucg

SEQ ID NO: 44785 - DNA, 21 bp, homo sapiens
cattagcagaaagcagcgaag

SEQ ID NO: 44786 - RNA, 21 nt, RNAi
uuagcagaaagcagcgaaguu

SEQ ID NO: 44787 - RNA, 21 nt, RNAi
uuaaucgucuuucgucgcuuc

SEQ ID NO: 44788 - DNA, 21 bp, homo sapiens
cagaaagcagcgaagaacagg

SEQ ID NO: 44789 - RNA, 21 nt, RNAi
gaaagcagcgaagaacagguu

SEQ ID NO: 44790 - RNA, 21 nt, RNAi
uucuuucgucgcuucuugucc

SEQ ID NO: 44791 - DNA, 21 bp, homo sapiens
cagcgaagaacaggaagatgc

SEQ ID NO: 44792 - RNA, 21 nt, RNAi
gcgaagaacaggaagaugcuu

SEQ ID NO: 44793 - RNA, 21 nt, RNAi
uucgcuucuuguccuucuacg

SEQ ID NO: 44794 - DNA, 21 bp, homo sapiens
caggaagatgcactgaatatc

SEQ ID NO: 44795 - RNA, 21 nt, RNAi
ggaagaugcacugaauaucuu

SEQ ID NO: 44796 - RNA, 21 nt, RNAi
uuccuucuacgugacuuauag

SEQ ID NO: 44797 - DNA, 21 bp, homo sapiens
cactgaatatctcctcaatgt

SEQ ID NO: 44798 - RNA, 21 nt, RNAi
cugaauaucuccucaauguuu

SEQ ID NO: 44799 - RNA, 21 nt, RNAi
uugacuuauagaggaguuaca

SEQ ID NO: 44800 - DNA, 21 bp, homo sapiens
caatgtctttacttgcaccat

SEQ ID NO: 44801 - RNA, 21 nt, RNAi
augucuuuacuugcaccauuu

SEQ ID NO: 44802 - RNA, 21 nt, RNAi
uuuacagaaaugaacguggua

SEQ ID NO: 44803 - DNA, 21 bp, homo sapiens
caccattggcacaaacagttg

SEQ ID NO: 44804 - RNA, 21 nt, RNAi
ccauuggcacaaacaguuguu

SEQ ID NO: 44805 - RNA, 21 nt, RNAi
uugguaaccguguuugucaac

SEQ ID NO: 44806 - DNA, 21 bp, homo sapiens
cattggcacaaacagttggtg

SEQ ID NO: 44807 - RNA, 21 nt, RNAi
uuggcacaaacaguugguguu

SEQ ID NO: 44808 - RNA, 21 nt, RNAi
uuaaccguguuugucaaccac

SEQ ID NO: 44809 - DNA, 21 bp, homo sapiens
cacaaacagttggtgtggtaa

SEQ ID NO: 44810 - RNA, 21 nt, RNAi
caaacaguuggugugguaauu

SEQ ID NO: 44811 - RNA, 21 nt, RNAi
uuguuugucaaccacaccauu

SEQ ID NO: 44812 - DNA, 21 bp, homo sapiens
caaacagttggtgtggtaagt

SEQ ID NO: 44813 - RNA, 21 nt, RNAi
aacaguuggugugguaaguuu

SEQ ID NO: 44814 - RNA, 21 nt, RNAi
uuuugucaaccacaccauuca

SEQ ID NO: 44815 - DNA, 21 bp, homo sapiens
cagttggtgtggtaagtccag

SEQ ID NO: 44816 - RNA, 21 nt, RNAi
guuggugugguaaguccaguu

SEQ ID NO: 44817 - RNA, 21 nt, RNAi
uucaaccacaccauucagguc

SEQ ID NO: 44818 - DNA, 21 bp, homo sapiens
cagagagtttagtgtccacac

SEQ ID NO: 44819 - RNA, 21 nt, RNAi
gagaguuuaguguccacacuu

SEQ ID NO: 44820 - RNA, 21 nt, RNAi
uucucucaaaucacaggugug

SEQ ID NO: 44821 - DNA, 21 bp, homo sapiens
cacacctagactggaattgaa

SEQ ID NO: 44822 - RNA, 21 nt, RNAi
caccuagacuggaauugaauu

SEQ ID NO: 44823 - RNA, 21 nt, RNAi
uuguggaucugaccuuaacuu

SEQ ID NO: 44824 - DNA, 21 bp, homo sapiens
cacctagactggaattgaaag

SEQ ID NO: 44825 - RNA, 21 nt, RNAi
ccuagacuggaauugaaaguu

SEQ ID NO: 44826 - RNA, 21 nt, RNAi
uuggaucugaccuuaacuuuc

SEQ ID NO: 44827 - DNA, 21 bp, homo sapiens
caccagcagaagtgatgaaag

SEQ ID NO: 44828 - RNA, 21 nt, RNAi
ccagcagaagugaugaaaguu

SEQ ID NO: 44829 - RNA, 21 nt, RNAi
uuggucgucuucacuacuuuc

SEQ ID NO: 44830 - DNA, 21 bp, homo sapiens
cagcagaagtgatgaaagtcc

SEQ ID NO: 44831 - RNA, 21 nt, RNAi
gcagaagugaugaaaguccuu

SEQ ID NO: 44832 - RNA, 21 nt, RNAi
uucgucuucacuacuuucagg

SEQ ID NO: 44833 - DNA, 21 bp, homo sapiens
cagaagtgatgaaagtccaaa

SEQ ID NO: 44834 - RNA, 21 nt, RNAi
gaagugaugaaaguccaaauu

SEQ ID NO: 44835 - RNA, 21 nt, RNAi
uucuucacuacuuucagguuu

SEQ ID NO: 44836 - DNA, 21 bp, homo sapiens
cagcattgatgcatatagatc

SEQ ID NO: 44837 - RNA, 21 nt, RNAi
gcauugaugcauauagaucuu

SEQ ID NO: 44838 - RNA, 21 nt, RNAi
uucguaacuacguauaucuag

SEQ ID NO: 44839 - DNA, 21 bp, homo sapiens
cattgatgcatatagatctca

SEQ ID NO: 44840 - RNA, 21 nt, RNAi
uugaugcauauagaucucauu

SEQ ID NO: 44841 - RNA, 21 nt, RNAi
uuaacuacguauaucuagagu

SEQ ID NO: 44842 - DNA, 21 bp, homo sapiens
caaagaaacagaacgtccatc

SEQ ID NO: 44843 - RNA, 21 nt, RNAi
aagaaacagaacguccaucuu

SEQ ID NO: 44844 - RNA, 21 nt, RNAi
uuuucuuugucuugcagguag

SEQ ID NO: 44845 - DNA, 21 bp, homo sapiens
cagaacgtccatcaataaagc

SEQ ID NO: 44846 - RNA, 21 nt, RNAi
gaacguccaucaauaaagcuu

SEQ ID NO: 44847 - RNA, 21 nt, RNAi
uucuugcagguaguuauuucg

SEQ ID NO: 44848 - DNA, 21 bp, homo sapiens
catcaataaagcaggtgattg

SEQ ID NO: 44849 - RNA, 21 nt, RNAi
ucaauaaagcaggugauuguu

SEQ ID NO: 44850 - RNA, 21 nt, RNAi
uuaguuauuucguccacuaac

SEQ ID NO: 44851 - DNA, 21 bp, homo sapiens
caataaagcaggtgattgttc

SEQ ID NO: 44852 - RNA, 21 nt, RNAi
auaaagcaggugauuguucuu

SEQ ID NO: 44853 - RNA, 21 nt, RNAi
uuuauuucguccacuaacaag

SEQ ID NO: 44854 - DNA, 21 bp, homo sapiens
caggtgattgttcggaaggaa

SEQ ID NO: 44855 - RNA, 21 nt, RNAi
ggugauuguucggaaggaauu

SEQ ID NO: 44856 - RNA, 21 nt, RNAi
uuccacuaacaagccuuccuu

SEQ ID NO: 44857 - DNA, 21 bp, homo sapiens
caggaactcaataacgaaata

SEQ ID NO: 44858 - RNA, 21 nt, RNAi
ggaacucaauaacgaaauauu

SEQ ID NO: 44859 - RNA, 21 nt, RNAi
uuccuugaguuauugcuuuau

SEQ ID NO: 44860 - DNA, 21 bp, homo sapiens
caacagacagtgatctatcaa

SEQ ID NO: 44861 - RNA, 21 nt, RNAi
acagacagugaucuaucaauu

SEQ ID NO: 44862 - RNA, 21 nt, RNAi
uuugucugucacuagauaguu

SEQ ID NO: 44863 - DNA, 21 bp, homo sapiens
cagacagtgatctatcaagct

SEQ ID NO: 44864 - RNA, 21 nt, RNAi
gacagugaucuaucaagcuuu

SEQ ID NO: 44865 - RNA, 21 nt, RNAi
uucugucacuagauaguucga

SEQ ID NO: 44866 - DNA, 21 bp, homo sapiens
cagtgatctatcaagctagcc

SEQ ID NO: 44867 - RNA, 21 nt, RNAi
gugaucuaucaagcuagccuu

SEQ ID NO: 44868 - RNA, 21 nt, RNAi
uucacuagauaguucgaucgg

SEQ ID NO: 44869 - DNA, 21 bp, homo sapiens
caagctagccaggctcttaac

SEQ ID NO: 44870 - RNA, 21 nt, RNAi
agcuagccaggcucuuaacuu

SEQ ID NO: 44871 - RNA, 21 nt, RNAi
uuucgaucgguccgagaauug

SEQ ID NO: 44872 - DNA, 21 bp, homo sapiens
caggctcttaactgctgtgtt

SEQ ID NO: 44873 - RNA, 21 nt, RNAi
ggcucuuaacugcuguguuuu

SEQ ID NO: 44874 - RNA, 21 nt, RNAi
uuccgagaauugacgacacaa

SEQ ID NO: 44875 - DNA, 21 bp, homo sapiens
cagaaagacttcttctaattg

SEQ ID NO: 44876 - RNA, 21 nt, RNAi
gaaagacuucuucuaauuguu

SEQ ID NO: 44877 - RNA, 21 nt, RNAi
uucuuucugaagaagauuaac

SEQ ID NO: 44878 - DNA, 21 bp, homo sapiens
cagaggaagaataaggctagt

SEQ ID NO: 44879 - RNA, 21 nt, RNAi
gaggaagaauaaggcuaguuu

SEQ ID NO: 44880 - RNA, 21 nt, RNAi
uucuccuucuuauuccgauca

SEQ ID NO: 44881 - DNA, 21 bp, homo sapiens
caaagtgaatttatgccatcc

SEQ ID NO: 44882 - RNA, 21 nt, RNAi
aagugaauuuaugccauccuu

SEQ ID NO: 44883 - RNA, 21 nt, RNAi
uuuucacuuaaauacgguagg

SEQ ID NO: 44884 - DNA, 21 bp, homo sapiens
catccaaaggatcagttactt

SEQ ID NO: 44885 - RNA, 21 nt, RNAi
uccaaaggaucaguuacuuuu

SEQ ID NO: 44886 - RNA, 21 nt, RNAi
uuagguuuccuagucaaugaa

SEQ ID NO: 44887 - DNA, 21 bp, homo sapiens
caaaggatcagttactttgtc

SEQ ID NO: 44888 - RNA, 21 nt, RNAi
aaggaucaguuacuuugucuu

SEQ ID NO: 44889 - RNA, 21 nt, RNAi
uuuuccuagucaaugaaacag

SEQ ID NO: 44890 - DNA, 21 bp, homo sapiens
cagttactttgtcagaaatcc

SEQ ID NO: 44891 - RNA, 21 nt, RNAi
guuacuuugucagaaauccuu

SEQ ID NO: 44892 - RNA, 21 nt, RNAi
uucaaugaaacagucuuuagg

SEQ ID NO: 44893 - DNA, 21 bp, homo sapiens
cagaaatccgcttgcctctaa

SEQ ID NO: 44894 - RNA, 21 nt, RNAi
gaaauccgcuugccucuaauu

SEQ ID NO: 44895 - RNA, 21 nt, RNAi
uucuuuaggcgaacggagauu

SEQ ID NO: 44896 - DNA, 21 bp, homo sapiens
cagtacggttcagaaaccaga

SEQ ID NO: 44897 - RNA, 21 nt, RNAi
guacgguucagaaaccagauu

SEQ ID NO: 44898 - RNA, 21 nt, RNAi
uucaugccaagucuuuggucu

SEQ ID NO: 44899 - DNA, 21 bp, homo sapiens
cagaaaccagatgcagcaaat

SEQ ID NO: 44900 - RNA, 21 nt, RNAi
gaaaccagaugcagcaaauuu

SEQ ID NO: 44901 - RNA, 21 nt, RNAi
uucuuuggucuacgucguuua

SEQ ID NO: 44902 - DNA, 21 bp, homo sapiens
cagatgcagcaaattactatt

SEQ ID NO: 44903 - RNA, 21 nt, RNAi
gaugcagcaaauuacuauuuu

SEQ ID NO: 44904 - RNA, 21 nt, RNAi
uucuacgucguuuaaugauaa

SEQ ID NO: 44905 - DNA, 21 bp, homo sapiens
cacaccattagcaagtacttc

SEQ ID NO: 44906 - RNA, 21 nt, RNAi
caccauuagcaaguacuucuu

SEQ ID NO: 44907 - RNA, 21 nt, RNAi
uugugguaaucguucaugaag

SEQ ID NO: 44908 - DNA, 21 bp, homo sapiens
caccattagcaagtacttcaa

SEQ ID NO: 44909 - RNA, 21 nt, RNAi
ccauuagcaaguacuucaauu

SEQ ID NO: 44910 - RNA, 21 nt, RNAi
uugguaaucguucaugaaguu

SEQ ID NO: 44911 - DNA, 21 bp, homo sapiens
cattagcaagtacttcaaact

SEQ ID NO: 44912 - RNA, 21 nt, RNAi
uuagcaaguacuucaaacuuu

SEQ ID NO: 44913 - RNA, 21 nt, RNAi
uuaaucguucaugaaguuuga

SEQ ID NO: 44914 - DNA, 21 bp, homo sapiens
caagtacttcaaactctctta

SEQ ID NO: 44915 - RNA, 21 nt, RNAi
aguacuucaaacucucuuauu

SEQ ID NO: 44916 - RNA, 21 nt, RNAi
uuucaugaaguuugagagaau

SEQ ID NO: 44917 - DNA, 21 bp, homo sapiens
caaactctcttaacggtgatg

SEQ ID NO: 44918 - RNA, 21 nt, RNAi
aacucucuuaacggugauguu

SEQ ID NO: 44919 - RNA, 21 nt, RNAi
uuuugagagaauugccacuac

SEQ ID NO: 44920 - DNA, 21 bp, homo sapiens
cattcactactacatttactc

SEQ ID NO: 44921 - RNA, 21 nt, RNAi
uucacuacuacauuuacucuu

SEQ ID NO: 44922 - RNA, 21 nt, RNAi
uuaagugaugauguaaaugag

SEQ ID NO: 44923 - DNA, 21 bp, homo sapiens
cactactacatttactctgca

SEQ ID NO: 44924 - RNA, 21 nt, RNAi
cuacuacauuuacucugcauu

SEQ ID NO: 44925 - RNA, 21 nt, RNAi
uugaugauguaaaugagacgu

SEQ ID NO: 44926 - DNA, 21 bp, homo sapiens
catttactctgcaagatgtat

SEQ ID NO: 44927 - RNA, 21 nt, RNAi
uuuacucugcaagauguauuu

SEQ ID NO: 44928 - RNA, 21 nt, RNAi
uuaaaugagacguucuacaua

SEQ ID NO: 44929 - DNA, 21 bp, homo sapiens
caagatgtatccaatgacttt

SEQ ID NO: 44930 - RNA, 21 nt, RNAi
agauguauccaaugacuuuuu

SEQ ID NO: 44931 - RNA, 21 nt, RNAi
uuucuacauagguuacugaaa

SEQ ID NO: 44932 - DNA, 21 bp, homo sapiens
catccaagtccaaggctatta

SEQ ID NO: 44933 - RNA, 21 nt, RNAi
uccaaguccaaggcuauuauu

SEQ ID NO: 44934 - RNA, 21 nt, RNAi
uuagguucagguuccgauaau

SEQ ID NO: 44935 - DNA, 21 bp, homo sapiens
caagtccaaggctattactcc

SEQ ID NO: 44936 - RNA, 21 nt, RNAi
aguccaaggcuauuacuccuu

SEQ ID NO: 44937 - RNA, 21 nt, RNAi
uuucagguuccgauaaugagg

SEQ ID NO: 44938 - DNA, 21 bp, homo sapiens
caaggctattactccaaagcg

SEQ ID NO: 44939 - RNA, 21 nt, RNAi
aggcuauuacuccaaagcguu

SEQ ID NO: 44940 - RNA, 21 nt, RNAi
uuuccgauaaugagguuucgc

SEQ ID NO: 44941 - DNA, 21 bp, homo sapiens
caaagcgactcctcacatcta

SEQ ID NO: 44942 - RNA, 21 nt, RNAi
aagcgacuccucacaucuauu

SEQ ID NO: 44943 - RNA, 21 nt, RNAi
uuuucgcugaggaguguagau

SEQ ID NO: 44944 - DNA, 21 bp, homo sapiens
caacattcattcttcagtcat

SEQ ID NO: 44945 - RNA, 21 nt, RNAi
acauucauucuucagucauuu

SEQ ID NO: 44946 - RNA, 21 nt, RNAi
uuuguaaguaagaagucagua

SEQ ID NO: 44947 - DNA, 21 bp, homo sapiens
cattcattcttcagtcatggc

SEQ ID NO: 44948 - RNA, 21 nt, RNAi
uucauucuucagucauggcuu

SEQ ID NO: 44949 - RNA, 21 nt, RNAi
uuaaguaagaagucaguaccg

SEQ ID NO: 44950 - DNA, 21 bp, homo sapiens
cattcttcagtcatggccagt

SEQ ID NO: 44951 - RNA, 21 nt, RNAi
uucuucagucauggccaguuu

SEQ ID NO: 44952 - RNA, 21 nt, RNAi
uuaagaagucaguaccgguca

SEQ ID NO: 44953 - DNA, 21 bp, homo sapiens
cagtcatggccagtccaggag

SEQ ID NO: 44954 - RNA, 21 nt, RNAi
gucauggccaguccaggaguu

SEQ ID NO: 44955 - RNA, 21 nt, RNAi
uucaguaccggucagguccuc

SEQ ID NO: 44956 - DNA, 21 bp, homo sapiens
catggccagtccaggaggtct

SEQ ID NO: 44957 - RNA, 21 nt, RNAi
uggccaguccaggaggucuuu

SEQ ID NO: 44958 - RNA, 21 nt, RNAi
uuaccggucagguccuccaga

SEQ ID NO: 44959 - DNA, 21 bp, homo sapiens
cagtccaggaggtcttagtgc

SEQ ID NO: 44960 - RNA, 21 nt, RNAi
guccaggaggucuuagugcuu

SEQ ID NO: 44961 - RNA, 21 nt, RNAi
uucagguccuccagaaucacg

SEQ ID NO: 44962 - DNA, 21 bp, homo sapiens
caggaggtcttagtgctgtgc

SEQ ID NO: 44963 - RNA, 21 nt, RNAi
ggaggucuuagugcugugcuu

SEQ ID NO: 44964 - RNA, 21 nt, RNAi
uuccuccagaaucacgacacg

SEQ ID NO: 44965 - DNA, 21 bp, homo sapiens
cacattatcattgtcttcagt

SEQ ID NO: 44966 - RNA, 21 nt, RNAi
cauuaucauugucuucaguuu

SEQ ID NO: 44967 - RNA, 21 nt, RNAi
uuguaauaguaacagaaguca

SEQ ID NO: 44968 - DNA, 21 bp, homo sapiens
cattatcattgtcttcagtag

SEQ ID NO: 44969 - RNA, 21 nt, RNAi
uuaucauugucuucaguaguu

SEQ ID NO: 44970 - RNA, 21 nt, RNAi
uuaauaguaacagaagucauc

SEQ ID NO: 44971 - DNA, 21 bp, homo sapiens
cattgtcttcagtaggaaata

SEQ ID NO: 44972 - RNA, 21 nt, RNAi
uugucuucaguaggaaauauu

SEQ ID NO: 44973 - RNA, 21 nt, RNAi
uuaacagaagucauccuuuau

SEQ ID NO: 44974 - DNA, 21 bp, homo sapiens
cagtaggaaatactaagtttg

SEQ ID NO: 44975 - RNA, 21 nt, RNAi
guaggaaauacuaaguuuguu

SEQ ID NO: 44976 - RNA, 21 nt, RNAi
uucauccuuuaugauucaaac

SEQ ID NO: 44977 - DNA, 21 bp, homo sapiens
caagtgaattccagtgttgaa

SEQ ID NO: 44978 - RNA, 21 nt, RNAi
agugaauuccaguguugaauu

SEQ ID NO: 44979 - RNA, 21 nt, RNAi
uuucacuuaaggucacaacuu

SEQ ID NO: 44980 - DNA, 21 bp, homo sapiens
cagtgttgaagaaagaggttt

SEQ ID NO: 44981 - RNA, 21 nt, RNAi
guguugaagaaagagguuuuu

SEQ ID NO: 44982 - RNA, 21 nt, RNAi
uucacaacuucuuucuccaaa

SEQ ID NO: 44983 - DNA, 21 bp, homo sapiens
catatttgaagatgttagtgg

SEQ ID NO: 44984 - RNA, 21 nt, RNAi
uauuugaagauguuagugguu

SEQ ID NO: 44985 - RNA, 21 nt, RNAi
uuauaaacuucuacaaucacc

SEQ ID NO: 44986 - DNA, 21 bp, homo sapiens
catcgaagatggtgtgttctt

SEQ ID NO: 44987 - RNA, 21 nt, RNAi
ucgaagaugguguguucuuuu

SEQ ID NO: 44988 - RNA, 21 nt, RNAi
uuagcuucuaccacacaagaa

SEQ ID NO: 44989 - DNA, 21 bp, homo sapiens
cagatgatgagaaacgcaaga

SEQ ID NO: 44990 - RNA, 21 nt, RNAi
gaugaugagaaacgcaagauu

SEQ ID NO: 44991 - RNA, 21 nt, RNAi
uucuacuacucuuugcguucu

SEQ ID NO: 44992 - DNA, 21 bp, homo sapiens
cataggaaggataaatctggc

SEQ ID NO: 44993 - RNA, 21 nt, RNAi
uaggaaggauaaaucuggcuu

SEQ ID NO: 44994 - RNA, 21 nt, RNAi
uuauccuuccuauuuagaccg

SEQ ID NO: 44995 - DNA, 21 bp, homo sapiens
cagtcgtcagatagaaccagc

SEQ ID NO: 44996 - RNA, 21 nt, RNAi
gucgucagauagaaccagcuu

SEQ ID NO: 44997 - RNA, 21 nt, RNAi
uucagcagucuaucuuggucg

SEQ ID NO: 44998 - DNA, 21 bp, homo sapiens
cagatagaaccagccaacaga

SEQ ID NO: 44999 - RNA, 21 nt, RNAi
gauagaaccagccaacagauu

SEQ ID NO: 45000 - RNA, 21 nt, RNAi
uucuaucuuggucgguugucu

SEQ ID NO: 45001 - DNA, 21 bp, homo sapiens
cacaaagagaagatgaccgag

SEQ ID NO: 45002 - RNA, 21 nt, RNAi
caaagagaagaugaccgaguu

SEQ ID NO: 45003 - RNA, 21 nt, RNAi
uuguuucucuucuacuggcuc

SEQ ID NO: 45004 - DNA, 21 bp, homo sapiens
caaagagaagatgaccgagag

SEQ ID NO: 45005 - RNA, 21 nt, RNAi
aagagaagaugaccgagaguu

SEQ ID NO: 45006 - RNA, 21 nt, RNAi
uuuucucuucuacuggcucuc

SEQ ID NO: 45007 - DNA, 21 bp, homo sapiens
cacactctgtgttaccaagaa

SEQ ID NO: 45008 - RNA, 21 nt, RNAi
cacucuguguuaccaagaauu

SEQ ID NO: 45009 - RNA, 21 nt, RNAi
uugugagacacaaugguucuu

SEQ ID NO: 45010 - DNA, 21 bp, homo sapiens
cactctgtgttaccaagaact

SEQ ID NO: 45011 - RNA, 21 nt, RNAi
cucuguguuaccaagaacuuu

SEQ ID NO: 45012 - RNA, 21 nt, RNAi
uugagacacaaugguucuuga

SEQ ID NO: 45013 - DNA, 21 bp, homo sapiens
caagaactggctgtctgcaga

SEQ ID NO: 45014 - RNA, 21 nt, RNAi
agaacuggcugucugcagauu

SEQ ID NO: 45015 - RNA, 21 nt, RNAi
uuucuugaccgacagacgucu

SEQ ID NO: 45016 - DNA, 21 bp, homo sapiens
caagttcttgttgatattcgc

SEQ ID NO: 45017 - RNA, 21 nt, RNAi
aguucuuguugauauucgcuu

SEQ ID NO: 45018 - RNA, 21 nt, RNAi
uuucaagaacaacuauaagcg

SEQ ID NO: 45019 - DNA, 21 bp, homo sapiens
caacctgatgcttgctacaaa

SEQ ID NO: 45020 - RNA, 21 nt, RNAi
accugaugcuugcuacaaauu

SEQ ID NO: 45021 - RNA, 21 nt, RNAi
uuuggacuacgaacgauguuu

SEQ ID NO: 45022 - DNA, 21 bp, homo sapiens
caaacctattggaaagcctta

SEQ ID NO: 45023 - RNA, 21 nt, RNAi
aaccuauuggaaagccuuauu

SEQ ID NO: 45024 - RNA, 21 nt, RNAi
uuuuggauaaccuuucggaau

SEQ ID NO: 45025 - DNA, 21 bp, homo sapiens
cacacttaagagcatcagatt

SEQ ID NO: 45026 - RNA, 21 nt, RNAi
cacuuaagagcaucagauuuu

SEQ ID NO: 45027 - RNA, 21 nt, RNAi
uugugaauucucguagucuaa

SEQ ID NO: 45028 - DNA, 21 bp, homo sapiens
cacttaagagcatcagattta

SEQ ID NO: 45029 - RNA, 21 nt, RNAi
cuuaagagcaucagauuuauu

SEQ ID NO: 45030 - RNA, 21 nt, RNAi
uugaauucucguagucuaaau

SEQ ID NO: 45031 - DNA, 21 bp, homo sapiens
catcagatttactgattgcat

SEQ ID NO: 45032 - RNA, 21 nt, RNAi
ucagauuuacugauugcauuu

SEQ ID NO: 45033 - RNA, 21 nt, RNAi
uuagucuaaaugacuaacgua

SEQ ID NO: 45034 - DNA, 21 bp, homo sapiens
cactacgtattatgcagtatt

SEQ ID NO: 45035 - RNA, 21 nt, RNAi
cuacguauuaugcaguauuuu

SEQ ID NO: 45036 - RNA, 21 nt, RNAi
uugaugcauaauacgucauaa

SEQ ID NO: 45037 - DNA, 21 bp, homo sapiens
cattcatcaatgagtagaagt

SEQ ID NO: 45038 - RNA, 21 nt, RNAi
uucaucaaugaguagaaguuu

SEQ ID NO: 45039 - RNA, 21 nt, RNAi
uuaaguaguuacucaucuuca

SEQ ID NO: 45040 - DNA, 21 bp, homo sapiens
cattctccaatctcagtagtt

SEQ ID NO: 45041 - RNA, 21 nt, RNAi
uucuccaaucucaguaguuuu

SEQ ID NO: 45042 - RNA, 21 nt, RNAi
uuaagagguuagagucaucaa

SEQ ID NO: 45043 - DNA, 21 bp, homo sapiens
gaagccgagaggagaagacag

SEQ ID NO: 45044 - RNA, 21 nt, RNAi
agccgagaggagaagacaguu

SEQ ID NO: 45045 - RNA, 21 nt, RNAi
uuucggcucuccucuucuguc

SEQ ID NO: 45046 - DNA, 21 bp, homo sapiens
gagaggagaagacagctggtt

SEQ ID NO: 45047 - RNA, 21 nt, RNAi
gaggagaagacagcugguuuu

SEQ ID NO: 45048 - RNA, 21 nt, RNAi
uucuccucuucugucgaccaa

SEQ ID NO: 45049 - DNA, 21 bp, homo sapiens
gaggagaagacagctggttgt

SEQ ID NO: 45050 - RNA, 21 nt, RNAi
ggagaagacagcugguuguuu

SEQ ID NO: 45051 - RNA, 21 nt, RNAi
uuccucuucugucgaccaaca

SEQ ID NO: 45052 - DNA, 21 bp, homo sapiens
gagacacactgagctgagact

SEQ ID NO: 45053 - RNA, 21 nt, RNAi
gacacacugagcugagacuuu

SEQ ID NO: 45054 - RNA, 21 nt, RNAi
uucugugugacucgacucuga

SEQ ID NO: 45055 - DNA, 21 bp, homo sapiens
gacacactgagctgagactca

SEQ ID NO: 45056 - RNA, 21 nt, RNAi
cacacugagcugagacucauu

SEQ ID NO: 45057 - RNA, 21 nt, RNAi
uugugugacucgacucugagu

SEQ ID NO: 45058 - DNA, 21 bp, homo sapiens
gaatttgaaccaccgtttcca

SEQ ID NO: 45059 - RNA, 21 nt, RNAi
auuugaaccaccguuuccauu

SEQ ID NO: 45060 - RNA, 21 nt, RNAi
uuuaaacuugguggcaaaggu

SEQ ID NO: 45061 - DNA, 21 bp, homo sapiens
gaaccaccgtttccatcgtct

SEQ ID NO: 45062 - RNA, 21 nt, RNAi
accaccguuuccaucgucuuu

SEQ ID NO: 45063 - RNA, 21 nt, RNAi
uuugguggcaaagguagcaga

SEQ ID NO: 45064 - DNA, 21 bp, homo sapiens
gatggatccgtttacggagaa

SEQ ID NO: 45065 - RNA, 21 nt, RNAi
uggauccguuuacggagaauu

SEQ ID NO: 45066 - RNA, 21 nt, RNAi
uuaccuaggcaaaugccucuu

SEQ ID NO: 45067 - DNA, 21 bp, homo sapiens
gatccgtttacggagaaactg

SEQ ID NO: 45068 - RNA, 21 nt, RNAi
uccguuuacggagaaacuguu

SEQ ID NO: 45069 - RNA, 21 nt, RNAi
uuaggcaaaugccucuuugac

SEQ ID NO: 45070 - DNA, 21 bp, homo sapiens
gagaaactgctggagcgaacc

SEQ ID NO: 45071 - RNA, 21 nt, RNAi
gaaacugcuggagcgaaccuu

SEQ ID NO: 45072 - RNA, 21 nt, RNAi
uucuuugacgaccucgcuugg

SEQ ID NO: 45073 - DNA, 21 bp, homo sapiens
gactcatgctaagcgagctag

SEQ ID NO: 45074 - RNA, 21 nt, RNAi
cucaugcuaagcgagcuaguu

SEQ ID NO: 45075 - RNA, 21 nt, RNAi
uugaguacgauucgcucgauc

SEQ ID NO: 45076 - DNA, 21 bp, homo sapiens
gagctagacagccactttcag

SEQ ID NO: 45077 - RNA, 21 nt, RNAi
gcuagacagccacuuucaguu

SEQ ID NO: 45078 - RNA, 21 nt, RNAi
uucgaucugucggugaaaguc

SEQ ID NO: 45079 - DNA, 21 bp, homo sapiens
gacagccactttcagaagcaa

SEQ ID NO: 45080 - RNA, 21 nt, RNAi
cagccacuuucagaagcaauu

SEQ ID NO: 45081 - RNA, 21 nt, RNAi
uugucggugaaagucuucguu

SEQ ID NO: 45082 - DNA, 21 bp, homo sapiens
gacaacactgaagtagaagtt

SEQ ID NO: 45083 - RNA, 21 nt, RNAi
caacacugaaguagaaguuuu

SEQ ID NO: 45084 - RNA, 21 nt, RNAi
uuguugugacuucaucuucaa

SEQ ID NO: 45085 - DNA, 21 bp, homo sapiens
gaagtagaagtttctaacttg

SEQ ID NO: 45086 - RNA, 21 nt, RNAi
aguagaaguuucuaacuuguu

SEQ ID NO: 45087 - RNA, 21 nt, RNAi
uuucaucuucaaagauugaac

SEQ ID NO: 45088 - DNA, 21 bp, homo sapiens
gataccatcagtgattctgtt

SEQ ID NO: 45089 - RNA, 21 nt, RNAi
uaccaucagugauucuguuuu

SEQ ID NO: 45090 - RNA, 21 nt, RNAi
uuaugguagucacuaagacaa

SEQ ID NO: 45091 - DNA, 21 bp, homo sapiens
gaactcaagattggaagcaac

SEQ ID NO: 45092 - RNA, 21 nt, RNAi
acucaagauuggaagcaacuu

SEQ ID NO: 45093 - RNA, 21 nt, RNAi
uuugaguucuaaccuucguug

SEQ ID NO: 45094 - DNA, 21 bp, homo sapiens
gattggaagcaactgcagcct

SEQ ID NO: 45095 - RNA, 21 nt, RNAi
uuggaagcaacugcagccuuu

SEQ ID NO: 45096 - RNA, 21 nt, RNAi
uuaaccuucguugacgucgga

SEQ ID NO: 45097 - DNA, 21 bp, homo sapiens
gaagcaactgcagcctcctca

SEQ ID NO: 45098 - RNA, 21 nt, RNAi
agcaacugcagccuccucauu

SEQ ID NO: 45099 - RNA, 21 nt, RNAi
uuucguugacgucggaggagu

SEQ ID NO: 45100 - DNA, 21 bp, homo sapiens
gatgatatgacagatgacatt

SEQ ID NO: 45101 - RNA, 21 nt, RNAi
ugauaugacagaugacauuuu

SEQ ID NO: 45102 - RNA, 21 nt, RNAi
uuacuauacugucuacuguaa

SEQ ID NO: 45103 - DNA, 21 bp, homo sapiens
gatatgacagatgacattcct

SEQ ID NO: 45104 - RNA, 21 nt, RNAi
uaugacagaugacauuccuuu

SEQ ID NO: 45105 - RNA, 21 nt, RNAi
uuauacugucuacuguaagga

SEQ ID NO: 45106 - DNA, 21 bp, homo sapiens
gacagatgacattcctgaaag

SEQ ID NO: 45107 - RNA, 21 nt, RNAi
cagaugacauuccugaaaguu

SEQ ID NO: 45108 - RNA, 21 nt, RNAi
uugucuacuguaaggacuuuc

SEQ ID NO: 45109 - DNA, 21 bp, homo sapiens
gatgacattcctgaaagctca

SEQ ID NO: 45110 - RNA, 21 nt, RNAi
ugacauuccugaaagcucauu

SEQ ID NO: 45111 - RNA, 21 nt, RNAi
uuacuguaaggacuuucgagu

SEQ ID NO: 45112 - DNA, 21 bp, homo sapiens
gacattcctgaaagctcactc

SEQ ID NO: 45113 - RNA, 21 nt, RNAi
cauuccugaaagcucacucuu

SEQ ID NO: 45114 - RNA, 21 nt, RNAi
uuguaaggacuuucgagugag

SEQ ID NO: 45115 - DNA, 21 bp, homo sapiens
gaaagctcactcttctcacca

SEQ ID NO: 45116 - RNA, 21 nt, RNAi
aagcucacucuucucaccauu

SEQ ID NO: 45117 - RNA, 21 nt, RNAi
uuuucgagugagaagaguggu

SEQ ID NO: 45118 - DNA, 21 bp, homo sapiens
gaagatgatgtaaatcactca

SEQ ID NO: 45119 - RNA, 21 nt, RNAi
agaugauguaaaucacucauu

SEQ ID NO: 45120 - RNA, 21 nt, RNAi
uuucuacuacauuuagugagu

SEQ ID NO: 45121 - DNA, 21 bp, homo sapiens
gatgtaaatcactcatttgca

SEQ ID NO: 45122 - RNA, 21 nt, RNAi
uguaaaucacucauuugcauu

SEQ ID NO: 45123 - RNA, 21 nt, RNAi
uuacauuuagugaguaaacgu

SEQ ID NO: 45124 - DNA, 21 bp, homo sapiens
gaacagcctggtaccgcttgt

SEQ ID NO: 45125 - RNA, 21 nt, RNAi
acagccugguaccgcuuguuu

SEQ ID NO: 45126 - RNA, 21 nt, RNAi
uuugucggaccauggcgaaca

SEQ ID NO: 45127 - DNA, 21 bp, homo sapiens
gagcatctgctaggatcaata

SEQ ID NO: 45128 - RNA, 21 nt, RNAi
gcaucugcuaggaucaauauu

SEQ ID NO: 45129 - RNA, 21 nt, RNAi
uucguagacgauccuaguuau

SEQ ID NO: 45130 - DNA, 21 bp, homo sapiens
gatcaatagcagcagtgttaa

SEQ ID NO: 45131 - RNA, 21 nt, RNAi
ucaauagcagcaguguuaauu

SEQ ID NO: 45132 - RNA, 21 nt, RNAi
uuaguuaucgucgucacaauu

SEQ ID NO: 45133 - DNA, 21 bp, homo sapiens
gatggcgatgcctctttgaat

SEQ ID NO: 45134 - RNA, 21 nt, RNAi
uggcgaugccucuuugaauuu

SEQ ID NO: 45135 - RNA, 21 nt, RNAi
uuaccgcuacggagaaacuua

SEQ ID NO: 45136 - DNA, 21 bp, homo sapiens
gatgcctctttgaataaagcc

SEQ ID NO: 45137 - RNA, 21 nt, RNAi
ugccucuuugaauaaagccuu

SEQ ID NO: 45138 - RNA, 21 nt, RNAi
uuacggagaaacuuauuucgg

SEQ ID NO: 45139 - DNA, 21 bp, homo sapiens
gatgatgcgtctttggttaat

SEQ ID NO: 45140 - RNA, 21 nt, RNAi
ugaugcgucuuugguuaauuu

SEQ ID NO: 45141 - RNA, 21 nt, RNAi
uuacuacgcagaaaccaauua

SEQ ID NO: 45142 - DNA, 21 bp, homo sapiens
gatgcgtctttggttaatgcc

SEQ ID NO: 45143 - RNA, 21 nt, RNAi
ugcgucuuugguuaaugccuu

SEQ ID NO: 45144 - RNA, 21 nt, RNAi
uuacgcagaaaccaauuacgg

SEQ ID NO: 45145 - DNA, 21 bp, homo sapiens
gaaagctacttcttctccagt

SEQ ID NO: 45146 - RNA, 21 nt, RNAi
aagcuacuucuucuccaguuu

SEQ ID NO: 45147 - RNA, 21 nt, RNAi
uuuucgaugaagaagagguca

SEQ ID NO: 45148 - DNA, 21 bp, homo sapiens
gaaatctactacatctatcac

SEQ ID NO: 45149 - RNA, 21 nt, RNAi
aaucuacuacaucuaucacuu

SEQ ID NO: 45150 - RNA, 21 nt, RNAi
uuuuagaugauguagauagug

SEQ ID NO: 45151 - DNA, 21 bp, homo sapiens
gaaaccaattgtgaagtcaac

SEQ ID NO: 45152 - RNA, 21 nt, RNAi
aaccaauugugaagucaacuu

SEQ ID NO: 45153 - RNA, 21 nt, RNAi
uuuugguuaacacuucaguug

SEQ ID NO: 45154 - DNA, 21 bp, homo sapiens
gagaaatttgtctgcaatctc

SEQ ID NO: 45155 - RNA, 21 nt, RNAi
gaaauuugucugcaaucucuu

SEQ ID NO: 45156 - RNA, 21 nt, RNAi
uucuuuaaacagacguuagag

SEQ ID NO: 45157 - DNA, 21 bp, homo sapiens
gaaatttgtctgcaatctcaa

SEQ ID NO: 45158 - RNA, 21 nt, RNAi
aauuugucugcaaucucaauu

SEQ ID NO: 45159 - RNA, 21 nt, RNAi
uuuuaaacagacguuagaguu

SEQ ID NO: 45160 - DNA, 21 bp, homo sapiens
gacaaatctacgacaccagga

SEQ ID NO: 45161 - RNA, 21 nt, RNAi
caaaucuacgacaccaggauu

SEQ ID NO: 45162 - RNA, 21 nt, RNAi
uuguuuagaugcugugguccu

SEQ ID NO: 45163 - DNA, 21 bp, homo sapiens
gacaccaggaggaacaggaat

SEQ ID NO: 45164 - RNA, 21 nt, RNAi
caccaggaggaacaggaauuu

SEQ ID NO: 45165 - RNA, 21 nt, RNAi
uugugguccuccuuguccuua

SEQ ID NO: 45166 - DNA, 21 bp, homo sapiens
gaggaacaggaattaagcctt

SEQ ID NO: 45167 - RNA, 21 nt, RNAi
ggaacaggaauuaagccuuuu

SEQ ID NO: 45168 - RNA, 21 nt, RNAi
uuccuuguccuuaauucggaa

SEQ ID NO: 45169 - DNA, 21 bp, homo sapiens
gaacaggaattaagcctttcc

SEQ ID NO: 45170 - RNA, 21 nt, RNAi
acaggaauuaagccuuuccuu

SEQ ID NO: 45171 - RNA, 21 nt, RNAi
uuuguccuuaauucggaaagg

SEQ ID NO: 45172 - DNA, 21 bp, homo sapiens
gaattaagcctttcctggaac

SEQ ID NO: 45173 - RNA, 21 nt, RNAi
auuaagccuuuccuggaacuu

SEQ ID NO: 45174 - RNA, 21 nt, RNAi
uuuaauucggaaaggaccuug

SEQ ID NO: 45175 - DNA, 21 bp, homo sapiens
gaacgctttggagagcgttgt

SEQ ID NO: 45176 - RNA, 21 nt, RNAi
acgcuuuggagagcguuguuu

SEQ ID NO: 45177 - RNA, 21 nt, RNAi
uuugcgaaaccucucgcaaca

SEQ ID NO: 45178 - DNA, 21 bp, homo sapiens
gagagcgttgtcaagaacata

SEQ ID NO: 45179 - RNA, 21 nt, RNAi
gagcguugucaagaacauauu

SEQ ID NO: 45180 - RNA, 21 nt, RNAi
uucucgcaacaguucuuguau

SEQ ID NO: 45181 - DNA, 21 bp, homo sapiens
gagcgttgtcaagaacatagc

SEQ ID NO: 45182 - RNA, 21 nt, RNAi
gcguugucaagaacauagcuu

SEQ ID NO: 45183 - RNA, 21 nt, RNAi
uucgcaacaguucuuguaucg

SEQ ID NO: 45184 - DNA, 21 bp, homo sapiens
gaacatagcaaagaaagtcca

SEQ ID NO: 45185 - RNA, 21 nt, RNAi
acauagcaaagaaaguccauu

SEQ ID NO: 45186 - RNA, 21 nt, RNAi
uuuguaucguuucuuucaggu

SEQ ID NO: 45187 - DNA, 21 bp, homo sapiens
gaaagtccagctcgtagcaca

SEQ ID NO: 45188 - RNA, 21 nt, RNAi
aaguccagcucguagcacauu

SEQ ID NO: 45189 - RNA, 21 nt, RNAi
uuuucaggucgagcaucgugu

SEQ ID NO: 45190 - DNA, 21 bp, homo sapiens
gaaagattattcaagcaagac

SEQ ID NO: 45191 - RNA, 21 nt, RNAi
aagauuauucaagcaagacuu

SEQ ID NO: 45192 - RNA, 21 nt, RNAi
uuuucuaauaaguucguucug

SEQ ID NO: 45193 - DNA, 21 bp, homo sapiens
gattattcaagcaagacacat

SEQ ID NO: 45194 - RNA, 21 nt, RNAi
uuauucaagcaagacacauuu

SEQ ID NO: 45195 - RNA, 21 nt, RNAi
uuaauaaguucguucugugua

SEQ ID NO: 45196 - DNA, 21 bp, homo sapiens
gacacatcttcatctactacc

SEQ ID NO: 45197 - RNA, 21 nt, RNAi
cacaucuucaucuacuaccuu

SEQ ID NO: 45198 - RNA, 21 nt, RNAi
uuguguagaaguagaugaugg

SEQ ID NO: 45199 - DNA, 21 bp, homo sapiens
gaactagcatgtcttcgtggc

SEQ ID NO: 45200 - RNA, 21 nt, RNAi
acuagcaugucuucguggcuu

SEQ ID NO: 45201 - RNA, 21 nt, RNAi
uuugaucguacagaagcaccg

SEQ ID NO: 45202 - DNA, 21 bp, homo sapiens
gaaaccaaacaggaaactcac

SEQ ID NO: 45203 - RNA, 21 nt, RNAi
aaccaaacaggaaacucacuu

SEQ ID NO: 45204 - RNA, 21 nt, RNAi
uuuugguuuguccuuugagug

SEQ ID NO: 45205 - DNA, 21 bp, homo sapiens
gaaactcactgtcagagcact

SEQ ID NO: 45206 - RNA, 21 nt, RNAi
aacucacugucagagcacuuu

SEQ ID NO: 45207 - RNA, 21 nt, RNAi
uuuugagugacagucucguga

SEQ ID NO: 45208 - DNA, 21 bp, homo sapiens
gaacctaaaggtttcactgaa

SEQ ID NO: 45209 - RNA, 21 nt, RNAi
accuaaagguuucacugaauu

SEQ ID NO: 45210 - RNA, 21 nt, RNAi
uuuggauuuccaaagugacuu

SEQ ID NO: 45211 - DNA, 21 bp, homo sapiens
gaatgcgaaatgacgaaatct

SEQ ID NO: 45212 - RNA, 21 nt, RNAi
augcgaaaugacgaaaucuuu

SEQ ID NO: 45213 - RNA, 21 nt, RNAi
uuuacgcuuuacugcuuuaga

SEQ ID NO: 45214 - DNA, 21 bp, homo sapiens
gaagtgatacgtgaaattgag

SEQ ID NO: 45215 - RNA, 21 nt, RNAi
agugauacgugaaauugaguu

SEQ ID NO: 45216 - RNA, 21 nt, RNAi
uuucacuaugcacuuuaacuc

SEQ ID NO: 45217 - DNA, 21 bp, homo sapiens
gatacgtgaaattgagatgag

SEQ ID NO: 45218 - RNA, 21 nt, RNAi
uacgugaaauugagaugaguu

SEQ ID NO: 45219 - RNA, 21 nt, RNAi
uuaugcacuuuaacucuacuc

SEQ ID NO: 45220 - DNA, 21 bp, homo sapiens
gaaattgagatgagtgtggat

SEQ ID NO: 45221 - RNA, 21 nt, RNAi
aauugagaugaguguggauuu

SEQ ID NO: 45222 - RNA, 21 nt, RNAi
uuuuaacucuacucacaccua

SEQ ID NO: 45223 - DNA, 21 bp, homo sapiens
gagatgagtgtggatgatgat

SEQ ID NO: 45224 - RNA, 21 nt, RNAi
gaugaguguggaugaugauuu

SEQ ID NO: 45225 - RNA, 21 nt, RNAi
uucuacucacaccuacuacua

SEQ ID NO: 45226 - DNA, 21 bp, homo sapiens
gatgagtgtggatgatgatga

SEQ ID NO: 45227 - RNA, 21 nt, RNAi
ugaguguggaugaugaugauu

SEQ ID NO: 45228 - RNA, 21 nt, RNAi
uuacucacaccuacuacuacu

SEQ ID NO: 45229 - DNA, 21 bp, homo sapiens
gagtgtggatgatgatgatat

SEQ ID NO: 45230 - RNA, 21 nt, RNAi
guguggaugaugaugauauuu

SEQ ID NO: 45231 - RNA, 21 nt, RNAi
uucacaccuacuacuacuaua

SEQ ID NO: 45232 - DNA, 21 bp, homo sapiens
gatgatgatatcaatagttcg

SEQ ID NO: 45233 - RNA, 21 nt, RNAi
ugaugauaucaauaguucguu

SEQ ID NO: 45234 - RNA, 21 nt, RNAi
uuacuacuauaguuaucaagc

SEQ ID NO: 45235 - DNA, 21 bp, homo sapiens
gacctcttcagtgatgtccta

SEQ ID NO: 45236 - RNA, 21 nt, RNAi
ccucuucagugauguccuauu

SEQ ID NO: 45237 - RNA, 21 nt, RNAi
uuggagaagucacuacaggau

SEQ ID NO: 45238 - DNA, 21 bp, homo sapiens
gatgtcctagaggaaggtgaa

SEQ ID NO: 45239 - RNA, 21 nt, RNAi
uguccuagaggaaggugaauu

SEQ ID NO: 45240 - RNA, 21 nt, RNAi
uuacaggaucuccuuccacuu

SEQ ID NO: 45241 - DNA, 21 bp, homo sapiens
gaggaaggtgaactagatatg

SEQ ID NO: 45242 - RNA, 21 nt, RNAi
ggaaggugaacuagauauguu

SEQ ID NO: 45243 - RNA, 21 nt, RNAi
uuccuuccacuugaucuauac

SEQ ID NO: 45244 - DNA, 21 bp, homo sapiens
gaaggtgaactagatatggag

SEQ ID NO: 45245 - RNA, 21 nt, RNAi
aggugaacuagauauggaguu

SEQ ID NO: 45246 - RNA, 21 nt, RNAi
uuuccacuugaucuauaccuc

SEQ ID NO: 45247 - DNA, 21 bp, homo sapiens
gaactagatatggagaagagc

SEQ ID NO: 45248 - RNA, 21 nt, RNAi
acuagauauggagaagagcuu

SEQ ID NO: 45249 - RNA, 21 nt, RNAi
uuugaucuauaccucuucucg

SEQ ID NO: 45250 - DNA, 21 bp, homo sapiens
gatatggagaagagccaagag

SEQ ID NO: 45251 - RNA, 21 nt, RNAi
uauggagaagagccaagaguu

SEQ ID NO: 45252 - RNA, 21 nt, RNAi
uuauaccucuucucgguucuc

SEQ ID NO: 45253 - DNA, 21 bp, homo sapiens
gagaagagccaagaggagatg

SEQ ID NO: 45254 - RNA, 21 nt, RNAi
gaagagccaagaggagauguu

SEQ ID NO: 45255 - RNA, 21 nt, RNAi
uucuucucgguucuccucuac

SEQ ID NO: 45256 - DNA, 21 bp, homo sapiens
gaagagccaagaggagatgga

SEQ ID NO: 45257 - RNA, 21 nt, RNAi
agagccaagaggagauggauu

SEQ ID NO: 45258 - RNA, 21 nt, RNAi
uuucucgguucuccucuaccu

SEQ ID NO: 45259 - DNA, 21 bp, homo sapiens
gagccaagaggagatggatca

SEQ ID NO: 45260 - RNA, 21 nt, RNAi
gccaagaggagauggaucauu

SEQ ID NO: 45261 - RNA, 21 nt, RNAi
uucgguucuccucuaccuagu

SEQ ID NO: 45262 - DNA, 21 bp, homo sapiens
gaggagatggatcaagcatta

SEQ ID NO: 45263 - RNA, 21 nt, RNAi
ggagauggaucaagcauuauu

SEQ ID NO: 45264 - RNA, 21 nt, RNAi
uuccucuaccuaguucguaau

SEQ ID NO: 45265 - DNA, 21 bp, homo sapiens
gagatggatcaagcattagca

SEQ ID NO: 45266 - RNA, 21 nt, RNAi
gauggaucaagcauuagcauu

SEQ ID NO: 45267 - RNA, 21 nt, RNAi
uucuaccuaguucguaaucgu

SEQ ID NO: 45268 - DNA, 21 bp, homo sapiens
gatggatcaagcattagcaga

SEQ ID NO: 45269 - RNA, 21 nt, RNAi
uggaucaagcauuagcagauu

SEQ ID NO: 45270 - RNA, 21 nt, RNAi
uuaccuaguucguaaucgucu

SEQ ID NO: 45271 - DNA, 21 bp, homo sapiens
gatcaagcattagcagaaagc

SEQ ID NO: 45272 - RNA, 21 nt, RNAi
ucaagcauuagcagaaagcuu

SEQ ID NO: 45273 - RNA, 21 nt, RNAi
uuaguucguaaucgucuuucg

SEQ ID NO: 45274 - DNA, 21 bp, homo sapiens
gaaagcagcgaagaacaggaa

SEQ ID NO: 45275 - RNA, 21 nt, RNAi
aagcagcgaagaacaggaauu

SEQ ID NO: 45276 - RNA, 21 nt, RNAi
uuuucgucgcuucuuguccuu

SEQ ID NO: 45277 - DNA, 21 bp, homo sapiens
gaagaacaggaagatgcactg

SEQ ID NO: 45278 - RNA, 21 nt, RNAi
agaacaggaagaugcacuguu

SEQ ID NO: 45279 - RNA, 21 nt, RNAi
uuucuuguccuucuacgugac

SEQ ID NO: 45280 - DNA, 21 bp, homo sapiens
gaacaggaagatgcactgaat

SEQ ID NO: 45281 - RNA, 21 nt, RNAi
acaggaagaugcacugaauuu

SEQ ID NO: 45282 - RNA, 21 nt, RNAi
uuuguccuucuacgugacuua

SEQ ID NO: 45283 - DNA, 21 bp, homo sapiens
gaagatgcactgaatatctcc

SEQ ID NO: 45284 - RNA, 21 nt, RNAi
agaugcacugaauaucuccuu

SEQ ID NO: 45285 - RNA, 21 nt, RNAi
uuucuacgugacuuauagagg

SEQ ID NO: 45286 - DNA, 21 bp, homo sapiens
gatgcactgaatatctcctca

SEQ ID NO: 45287 - RNA, 21 nt, RNAi
ugcacugaauaucuccucauu

SEQ ID NO: 45288 - RNA, 21 nt, RNAi
uuacgugacuuauagaggagu

SEQ ID NO: 45289 - DNA, 21 bp, homo sapiens
gaatatctcctcaatgtcttt

SEQ ID NO: 45290 - RNA, 21 nt, RNAi
auaucuccucaaugucuuuuu

SEQ ID NO: 45291 - RNA, 21 nt, RNAi
uuuauagaggaguuacagaaa

SEQ ID NO: 45292 - DNA, 21 bp, homo sapiens
gagagtttagtgtccacacct

SEQ ID NO: 45293 - RNA, 21 nt, RNAi
gaguuuaguguccacaccuuu

SEQ ID NO: 45294 - RNA, 21 nt, RNAi
uucucaaaucacaggugugga

SEQ ID NO: 45295 - DNA, 21 bp, homo sapiens
gagtttagtgtccacacctag

SEQ ID NO: 45296 - RNA, 21 nt, RNAi
guuuaguguccacaccuaguu

SEQ ID NO: 45297 - RNA, 21 nt, RNAi
uucaaaucacagguguggauc

SEQ ID NO: 45298 - DNA, 21 bp, homo sapiens
gactggaattgaaagacacca

SEQ ID NO: 45299 - RNA, 21 nt, RNAi
cuggaauugaaagacaccauu

SEQ ID NO: 45300 - RNA, 21 nt, RNAi
uugaccuuaacuuucuguggu

SEQ ID NO: 45301 - DNA, 21 bp, homo sapiens
gaattgaaagacaccagcaga

SEQ ID NO: 45302 - RNA, 21 nt, RNAi
auugaaagacaccagcagauu

SEQ ID NO: 45303 - RNA, 21 nt, RNAi
uuuaacuuucuguggucgucu

SEQ ID NO: 45304 - DNA, 21 bp, homo sapiens
gaaagacaccagcagaagtga

SEQ ID NO: 45305 - RNA, 21 nt, RNAi
aagacaccagcagaagugauu

SEQ ID NO: 45306 - RNA, 21 nt, RNAi
uuuucuguggucgucuucacu

SEQ ID NO: 45307 - DNA, 21 bp, homo sapiens
gacaccagcagaagtgatgaa

SEQ ID NO: 45308 - RNA, 21 nt, RNAi
caccagcagaagugaugaauu

SEQ ID NO: 45309 - RNA, 21 nt, RNAi
uuguggucgucuucacuacuu

SEQ ID NO: 45310 - DNA, 21 bp, homo sapiens
gagctgaatctggtgatagcc

SEQ ID NO: 45311 - RNA, 21 nt, RNAi
gcugaaucuggugauagccuu

SEQ ID NO: 45312 - RNA, 21 nt, RNAi
uucgacuuagaccacuaucgg

SEQ ID NO: 45313 - DNA, 21 bp, homo sapiens
gaatctggtgatagccttggt

SEQ ID NO: 45314 - RNA, 21 nt, RNAi
aucuggugauagccuugguuu

SEQ ID NO: 45315 - RNA, 21 nt, RNAi
uuuagaccacuaucggaacca

SEQ ID NO: 45316 - DNA, 21 bp, homo sapiens
gatagccttggttctgaagat

SEQ ID NO: 45317 - RNA, 21 nt, RNAi
uagccuugguucugaagauuu

SEQ ID NO: 45318 - RNA, 21 nt, RNAi
uuaucggaaccaagacuucua

SEQ ID NO: 45319 - DNA, 21 bp, homo sapiens
gaagatcgtgatcttctttac

SEQ ID NO: 45320 - RNA, 21 nt, RNAi
agaucgugaucuucuuuacuu

SEQ ID NO: 45321 - RNA, 21 nt, RNAi
uuucuagcacuagaagaaaug

SEQ ID NO: 45322 - DNA, 21 bp, homo sapiens
gatcgtgatcttctttacagc

SEQ ID NO: 45323 - RNA, 21 nt, RNAi
ucgugaucuucuuuacagcuu

SEQ ID NO: 45324 - RNA, 21 nt, RNAi
uuagcacuagaagaaaugucg

SEQ ID NO: 45325 - DNA, 21 bp, homo sapiens
gatcttctttacagcattgat

SEQ ID NO: 45326 - RNA, 21 nt, RNAi
ucuucuuuacagcauugauuu

SEQ ID NO: 45327 - RNA, 21 nt, RNAi
uuagaagaaaugucguaacua

SEQ ID NO: 45328 - DNA, 21 bp, homo sapiens
gatgcatatagatctcaaaga

SEQ ID NO: 45329 - RNA, 21 nt, RNAi
ugcauauagaucucaaagauu

SEQ ID NO: 45330 - RNA, 21 nt, RNAi
uuacguauaucuagaguuucu

SEQ ID NO: 45331 - DNA, 21 bp, homo sapiens
gattcaaagaaacagaacgtc

SEQ ID NO: 45332 - RNA, 21 nt, RNAi
uucaaagaaacagaacgucuu

SEQ ID NO: 45333 - RNA, 21 nt, RNAi
uuaaguuucuuugucuugcag

SEQ ID NO: 45334 - DNA, 21 bp, homo sapiens
gaaacagaacgtccatcaata

SEQ ID NO: 45335 - RNA, 21 nt, RNAi
aacagaacguccaucaauauu

SEQ ID NO: 45336 - RNA, 21 nt, RNAi
uuuugucuugcagguaguuau

SEQ ID NO: 45337 - DNA, 21 bp, homo sapiens
gaacgtccatcaataaagcag

SEQ ID NO: 45338 - RNA, 21 nt, RNAi
acguccaucaauaaagcaguu

SEQ ID NO: 45339 - RNA, 21 nt, RNAi
uuugcagguaguuauuucguc

SEQ ID NO: 45340 - DNA, 21 bp, homo sapiens
gattgttcggaaggaagatgt

SEQ ID NO: 45341 - RNA, 21 nt, RNAi
uuguucggaaggaagauguuu

SEQ ID NO: 45342 - RNA, 21 nt, RNAi
uuaacaagccuuccuucuaca

SEQ ID NO: 45343 - DNA, 21 bp, homo sapiens
gaaggaagatgttacttcaaa

SEQ ID NO: 45344 - RNA, 21 nt, RNAi
aggaagauguuacuucaaauu

SEQ ID NO: 45345 - RNA, 21 nt, RNAi
uuuccuucuacaaugaaguuu

SEQ ID NO: 45346 - DNA, 21 bp, homo sapiens
gacagtgatctatcaagctag

SEQ ID NO: 45347 - RNA, 21 nt, RNAi
cagugaucuaucaagcuaguu

SEQ ID NO: 45348 - RNA, 21 nt, RNAi
uugucacuagauaguucgauc

SEQ ID NO: 45349 - DNA, 21 bp, homo sapiens
gatctatcaagctagccaggc

SEQ ID NO: 45350 - RNA, 21 nt, RNAi
ucuaucaagcuagccaggcuu

SEQ ID NO: 45351 - RNA, 21 nt, RNAi
uuagauaguucgaucgguccg

SEQ ID NO: 45352 - DNA, 21 bp, homo sapiens
gaagaagctgaagcagaaaga

SEQ ID NO: 45353 - RNA, 21 nt, RNAi
agaagcugaagcagaaagauu

SEQ ID NO: 45354 - RNA, 21 nt, RNAi
uuucuucgacuucgucuuucu

SEQ ID NO: 45355 - DNA, 21 bp, homo sapiens
gaagctgaagcagaaagactt

SEQ ID NO: 45356 - RNA, 21 nt, RNAi
agcugaagcagaaagacuuuu

SEQ ID NO: 45357 - RNA, 21 nt, RNAi
uuucgacuucgucuuucugaa

SEQ ID NO: 45358 - DNA, 21 bp, homo sapiens
gaagcagaaagacttcttcta

SEQ ID NO: 45359 - RNA, 21 nt, RNAi
agcagaaagacuucuucuauu

SEQ ID NO: 45360 - RNA, 21 nt, RNAi
uuucgucuuucugaagaagau

SEQ ID NO: 45361 - DNA, 21 bp, homo sapiens
gaaagacttcttctaattgca

SEQ ID NO: 45362 - RNA, 21 nt, RNAi
aagacuucuucuaauugcauu

SEQ ID NO: 45363 - RNA, 21 nt, RNAi
uuuucugaagaagauuaacgu

SEQ ID NO: 45364 - DNA, 21 bp, homo sapiens
gacttcttctaattgcaactg

SEQ ID NO: 45365 - RNA, 21 nt, RNAi
cuucuucuaauugcaacuguu

SEQ ID NO: 45366 - RNA, 21 nt, RNAi
uugaagaagauuaacguugac

SEQ ID NO: 45367 - DNA, 21 bp, homo sapiens
gaataaattgaagaacgaagg

SEQ ID NO: 45368 - RNA, 21 nt, RNAi
auaaauugaagaacgaagguu

SEQ ID NO: 45369 - RNA, 21 nt, RNAi
uuuauuuaacuucuugcuucc

SEQ ID NO: 45370 - DNA, 21 bp, homo sapiens
gaagaacgaaggacctcagag

SEQ ID NO: 45371 - RNA, 21 nt, RNAi
agaacgaaggaccucagaguu

SEQ ID NO: 45372 - RNA, 21 nt, RNAi
uuucuugcuuccuggagucuc

SEQ ID NO: 45373 - DNA, 21 bp, homo sapiens
gaacgaaggacctcagaggaa

SEQ ID NO: 45374 - RNA, 21 nt, RNAi
acgaaggaccucagaggaauu

SEQ ID NO: 45375 - RNA, 21 nt, RNAi
uuugcuuccuggagucuccuu

SEQ ID NO: 45376 - DNA, 21 bp, homo sapiens
gaaggacctcagaggaagaat

SEQ ID NO: 45377 - RNA, 21 nt, RNAi
aggaccucagaggaagaauuu

SEQ ID NO: 45378 - RNA, 21 nt, RNAi
uuuccuggagucuccuucuua

SEQ ID NO: 45379 - DNA, 21 bp, homo sapiens
gacctcagaggaagaataagg

SEQ ID NO: 45380 - RNA, 21 nt, RNAi
ccucagaggaagaauaagguu

SEQ ID NO: 45381 - RNA, 21 nt, RNAi
uuggagucuccuucuuauucc

SEQ ID NO: 45382 - DNA, 21 bp, homo sapiens
gaggaagaataaggctagtcc

SEQ ID NO: 45383 - RNA, 21 nt, RNAi
ggaagaauaaggcuaguccuu

SEQ ID NO: 45384 - RNA, 21 nt, RNAi
uuccuucuuauuccgaucagg

SEQ ID NO: 45385 - DNA, 21 bp, homo sapiens
gaatttatgccatccaaagga

SEQ ID NO: 45386 - RNA, 21 nt, RNAi
auuuaugccauccaaaggauu

SEQ ID NO: 45387 - RNA, 21 nt, RNAi
uuuaaauacgguagguuuccu

SEQ ID NO: 45388 - DNA, 21 bp, homo sapiens
gatcagttactttgtcagaaa

SEQ ID NO: 45389 - RNA, 21 nt, RNAi
ucaguuacuuugucagaaauu

SEQ ID NO: 45390 - RNA, 21 nt, RNAi
uuagucaaugaaacagucuuu

SEQ ID NO: 45391 - DNA, 21 bp, homo sapiens
gaaaccagatgcagcaaatta

SEQ ID NO: 45392 - RNA, 21 nt, RNAi
aaccagaugcagcaaauuauu

SEQ ID NO: 45393 - RNA, 21 nt, RNAi
uuuuggucuacgucguuuaau

SEQ ID NO: 45394 - DNA, 21 bp, homo sapiens
gatgcagcaaattactattac

SEQ ID NO: 45395 - RNA, 21 nt, RNAi
ugcagcaaauuacuauuacuu

SEQ ID NO: 45396 - RNA, 21 nt, RNAi
uuacgucguuuaaugauaaug

SEQ ID NO: 45397 - DNA, 21 bp, homo sapiens
gatgctctgacattcactact

SEQ ID NO: 45398 - RNA, 21 nt, RNAi
ugcucugacauucacuacuuu

SEQ ID NO: 45399 - RNA, 21 nt, RNAi
uuacgagacuguaagugauga

SEQ ID NO: 45400 - DNA, 21 bp, homo sapiens
gacattcactactacatttac

SEQ ID NO: 45401 - RNA, 21 nt, RNAi
cauucacuacuacauuuacuu

SEQ ID NO: 45402 - RNA, 21 nt, RNAi
uuguaagugaugauguaaaug

SEQ ID NO: 45403 - DNA, 21 bp, homo sapiens
gatgtatccaatgactttgaa

SEQ ID NO: 45404 - RNA, 21 nt, RNAi
uguauccaaugacuuugaauu

SEQ ID NO: 45405 - RNA, 21 nt, RNAi
uuacauagguuacugaaacuu

SEQ ID NO: 45406 - DNA, 21 bp, homo sapiens
gaagtttacagcttggtgcaa

SEQ ID NO: 45407 - RNA, 21 nt, RNAi
aguuuacagcuuggugcaauu

SEQ ID NO: 45408 - RNA, 21 nt, RNAi
uuucaaaugucgaaccacguu

SEQ ID NO: 45409 - DNA, 21 bp, homo sapiens
gactcctcacatctataacca

SEQ ID NO: 45410 - RNA, 21 nt, RNAi
cuccucacaucuauaaccauu

SEQ ID NO: 45411 - RNA, 21 nt, RNAi
uugaggaguguagauauuggu

SEQ ID NO: 45412 - DNA, 21 bp, homo sapiens
gaggtcttagtgctgtgcgaa

SEQ ID NO: 45413 - RNA, 21 nt, RNAi
ggucuuagugcugugcgaauu

SEQ ID NO: 45414 - RNA, 21 nt, RNAi
uuccagaaucacgacacgcuu

SEQ ID NO: 45415 - DNA, 21 bp, homo sapiens
gaaatactaagtttgttctgg

SEQ ID NO: 45416 - RNA, 21 nt, RNAi
aauacuaaguuuguucugguu

SEQ ID NO: 45417 - RNA, 21 nt, RNAi
uuuuaugauucaaacaagacc

SEQ ID NO: 45418 - DNA, 21 bp, homo sapiens
gaattccagtgttgaagaaag

SEQ ID NO: 45419 - RNA, 21 nt, RNAi
auuccaguguugaagaaaguu

SEQ ID NO: 45420 - RNA, 21 nt, RNAi
uuuaaggucacaacuucuuuc

SEQ ID NO: 45421 - DNA, 21 bp, homo sapiens
gaagatggtgtgttctttctg

SEQ ID NO: 45422 - RNA, 21 nt, RNAi
agaugguguguucuuucuguu

SEQ ID NO: 45423 - RNA, 21 nt, RNAi
uuucuaccacacaagaaagac

SEQ ID NO: 45424 - DNA, 21 bp, homo sapiens
gatggtgtgttctttctggaa

SEQ ID NO: 45425 - RNA, 21 nt, RNAi
ugguguguucuuucuggaauu

SEQ ID NO: 45426 - RNA, 21 nt, RNAi
uuaccacacaagaaagaccuu

SEQ ID NO: 45427 - DNA, 21 bp, homo sapiens
gacttatccagatgatgagaa

SEQ ID NO: 45428 - RNA, 21 nt, RNAi
cuuauccagaugaugagaauu

SEQ ID NO: 45429 - RNA, 21 nt, RNAi
uugaauaggucuacuacucuu

SEQ ID NO: 45430 - DNA, 21 bp, homo sapiens
gatgatgagaaacgcaagaat

SEQ ID NO: 45431 - RNA, 21 nt, RNAi
ugaugagaaacgcaagaauuu

SEQ ID NO: 45432 - RNA, 21 nt, RNAi
uuacuacucuuugcguucuua

SEQ ID NO: 45433 - DNA, 21 bp, homo sapiens
gaaggataaatctggctaatt

SEQ ID NO: 45434 - RNA, 21 nt, RNAi
aggauaaaucuggcuaauuuu

SEQ ID NO: 45435 - RNA, 21 nt, RNAi
uuuccuauuuagaccgauuaa

SEQ ID NO: 45436 - DNA, 21 bp, homo sapiens
gataaatctggctaattgtac

SEQ ID NO: 45437 - RNA, 21 nt, RNAi
uaaaucuggcuaauuguacuu

SEQ ID NO: 45438 - RNA, 21 nt, RNAi
uuauuuagaccgauuaacaug

SEQ ID NO: 45439 - DNA, 21 bp, homo sapiens
gatagaaccagccaacagaga

SEQ ID NO: 45440 - RNA, 21 nt, RNAi
uagaaccagccaacagagauu

SEQ ID NO: 45441 - RNA, 21 nt, RNAi
uuaucuuggucgguugucucu

SEQ ID NO: 45442 - DNA, 21 bp, homo sapiens
gaaccagccaacagagaattt

SEQ ID NO: 45443 - RNA, 21 nt, RNAi
accagccaacagagaauuuuu

SEQ ID NO: 45444 - RNA, 21 nt, RNAi
uuuggucgguugucucuuaaa

SEQ ID NO: 45445 - DNA, 21 bp, homo sapiens
gaattaattactgtccgacca

SEQ ID NO: 45446 - RNA, 21 nt, RNAi
auuaauuacuguccgaccauu

SEQ ID NO: 45447 - RNA, 21 nt, RNAi
uuuaauuaaugacaggcuggu

SEQ ID NO: 45448 - DNA, 21 bp, homo sapiens
gaccacaaagagaagatgacc

SEQ ID NO: 45449 - RNA, 21 nt, RNAi
ccacaaagagaagaugaccuu

SEQ ID NO: 45450 - RNA, 21 nt, RNAi
uugguguuucucuucuacugg

SEQ ID NO: 45451 - DNA, 21 bp, homo sapiens
gagaagatgaccgagagactc

SEQ ID NO: 45452 - RNA, 21 nt, RNAi
gaagaugaccgagagacucuu

SEQ ID NO: 45453 - RNA, 21 nt, RNAi
uucuucuacuggcucucugag

SEQ ID NO: 45454 - DNA, 21 bp, homo sapiens
gaagatgaccgagagactctt

SEQ ID NO: 45455 - RNA, 21 nt, RNAi
agaugaccgagagacucuuuu

SEQ ID NO: 45456 - RNA, 21 nt, RNAi
uuucuacuggcucucugagaa

SEQ ID NO: 45457 - DNA, 21 bp, homo sapiens
gatgaccgagagactcttgtc

SEQ ID NO: 45458 - RNA, 21 nt, RNAi
ugaccgagagacucuugucuu

SEQ ID NO: 45459 - RNA, 21 nt, RNAi
uuacuggcucucugagaacag

SEQ ID NO: 45460 - DNA, 21 bp, homo sapiens
gaccgagagactcttgtcagc

SEQ ID NO: 45461 - RNA, 21 nt, RNAi
ccgagagacucuugucagcuu

SEQ ID NO: 45462 - RNA, 21 nt, RNAi
uuggcucucugagaacagucg

SEQ ID NO: 45463 - DNA, 21 bp, homo sapiens
gagagactcttgtcagccaat

SEQ ID NO: 45464 - RNA, 21 nt, RNAi
gagacucuugucagccaauuu

SEQ ID NO: 45465 - RNA, 21 nt, RNAi
uucucugagaacagucgguua

SEQ ID NO: 45466 - DNA, 21 bp, homo sapiens
gagactcttgtcagccaatgc

SEQ ID NO: 45467 - RNA, 21 nt, RNAi
gacucuugucagccaaugcuu

SEQ ID NO: 45468 - RNA, 21 nt, RNAi
uucugagaacagucgguuacg

SEQ ID NO: 45469 - DNA, 21 bp, homo sapiens
gactcttgtcagccaatgcag

SEQ ID NO: 45470 - RNA, 21 nt, RNAi
cucuugucagccaaugcaguu

SEQ ID NO: 45471 - RNA, 21 nt, RNAi
uugagaacagucgguuacguc

SEQ ID NO: 45472 - DNA, 21 bp, homo sapiens
gacacactctgtgttaccaag

SEQ ID NO: 45473 - RNA, 21 nt, RNAi
cacacucuguguuaccaaguu

SEQ ID NO: 45474 - RNA, 21 nt, RNAi
uugugugagacacaaugguuc

SEQ ID NO: 45475 - DNA, 21 bp, homo sapiens
gaactggctgtctgcagatac

SEQ ID NO: 45476 - RNA, 21 nt, RNAi
acuggcugucugcagauacuu

SEQ ID NO: 45477 - RNA, 21 nt, RNAi
uuugaccgacagacgucuaug

SEQ ID NO: 45478 - DNA, 21 bp, homo sapiens
gatattcgcctctggcaacct

SEQ ID NO: 45479 - RNA, 21 nt, RNAi
uauucgccucuggcaaccuuu

SEQ ID NO: 45480 - RNA, 21 nt, RNAi
uuauaagcggagaccguugga

SEQ ID NO: 45481 - DNA, 21 bp, homo sapiens
gatgcttgctacaaacctatt

SEQ ID NO: 45482 - RNA, 21 nt, RNAi
ugcuugcuacaaaccuauuuu

SEQ ID NO: 45483 - RNA, 21 nt, RNAi
uuacgaacgauguuuggauaa

SEQ ID NO: 45484 - DNA, 21 bp, homo sapiens
gaaatttccatgctatctaga

SEQ ID NO: 45485 - RNA, 21 nt, RNAi
aauuuccaugcuaucuagauu

SEQ ID NO: 45486 - RNA, 21 nt, RNAi
uuuuaaagguacgauagaucu

SEQ ID NO: 45487 - DNA, 21 bp, homo sapiens
gatgtcatcttaagaaacaca

SEQ ID NO: 45488 - RNA, 21 nt, RNAi
ugucaucuuaagaaacacauu

SEQ ID NO: 45489 - RNA, 21 nt, RNAi
uuacaguagaauucuuugugu

SEQ ID NO: 45490 - DNA, 21 bp, homo sapiens
gaaacacacttaagagcatca

SEQ ID NO: 45491 - RNA, 21 nt, RNAi
aacacacuuaagagcaucauu

SEQ ID NO: 45492 - RNA, 21 nt, RNAi
uuuugugugaauucucguagu

SEQ ID NO: 45493 - DNA, 21 bp, homo sapiens
gagcatcagatttactgattg

SEQ ID NO: 45494 - RNA, 21 nt, RNAi
gcaucagauuuacugauuguu

SEQ ID NO: 45495 - RNA, 21 nt, RNAi
uucguagucuaaaugacuaac

SEQ ID NO: 45496 - DNA, 21 bp, homo sapiens
gatttctgtcattcatcaatg

SEQ ID NO: 45497 - RNA, 21 nt, RNAi
uuucugucauucaucaauguu

SEQ ID NO: 45498 - RNA, 21 nt, RNAi
uuaaagacaguaaguaguuac

SEQ ID NO: 45499 - DNA, 21 bp, homo sapiens
gaaattctgagttgtcttctt

SEQ ID NO: 45500 - RNA, 21 nt, RNAi
aauucugaguugucuucuuuu

SEQ ID NO: 45501 - RNA, 21 nt, RNAi
uuuuaagacucaacagaagaa

SEQ ID NO: 45502 - DNA, 21 bp, homo sapiens
gagttgtcttcttggagctgt

SEQ ID NO: 45503 - RNA, 21 nt, RNAi
guugucuucuuggagcuguuu

SEQ ID NO: 45504 - RNA, 21 nt, RNAi
uucaacagaagaaccucgaca

SEQ ID NO: 45505 - DNA, 21 bp, homo sapiens
gagctgtaggtcttgaagcag

SEQ ID NO: 45506 - RNA, 21 nt, RNAi
gcuguaggucuugaagcaguu

SEQ ID NO: 45507 - RNA, 21 nt, RNAi
uucgacauccagaacuucguc

SEQ ID NO: 45508 - DNA, 21 bp, homo sapiens
gaagcagcaacgtctttcagg

SEQ ID NO: 45509 - RNA, 21 nt, RNAi
agcagcaacgucuuucagguu

SEQ ID NO: 45510 - RNA, 21 nt, RNAi
uuucgucguugcagaaagucc

SEQ ID NO: 45511 - DNA, 21 bp, homo sapiens
gaaaggctgtgatcatttatt

SEQ ID NO: 45512 - RNA, 21 nt, RNAi
aaggcugugaucauuuauuuu

SEQ ID NO: 45513 - RNA, 21 nt, RNAi
uuuuccgacacuaguaaauaa

SEQ ID NO: 45514 - DNA, 21 bp, homo sapiens
gatcgtgatatgacttgttac

SEQ ID NO: 45515 - RNA, 21 nt, RNAi
ucgugauaugacuuguuacuu

SEQ ID NO: 45516 - RNA, 21 nt, RNAi
uuagcacuauacugaacaaug

SEQ ID NO: 45517 - DNA, 21 bp, homo sapiens
tacggagaaactgctggagcg

SEQ ID NO: 45518 - RNA, 21 nt, RNAi
cggagaaacugcuggagcguu

SEQ ID NO: 45519 - RNA, 21 nt, RNAi
uugccucuuugacgaccucgc

SEQ ID NO: 45520 - DNA, 21 bp, homo sapiens
tatgactcatgctaagcgagc

SEQ ID NO: 45521 - RNA, 21 nt, RNAi
ugacucaugcuaagcgagcuu

SEQ ID NO: 45522 - RNA, 21 nt, RNAi
uuacugaguacgauucgcucg

SEQ ID NO: 45523 - DNA, 21 bp, homo sapiens
taagcgagctagacagccact

SEQ ID NO: 45524 - RNA, 21 nt, RNAi
agcgagcuagacagccacuuu

SEQ ID NO: 45525 - RNA, 21 nt, RNAi
uuucgcucgaucugucgguga

SEQ ID NO: 45526 - DNA, 21 bp, homo sapiens
tagacagccactttcagaagc

SEQ ID NO: 45527 - RNA, 21 nt, RNAi
gacagccacuuucagaagcuu

SEQ ID NO: 45528 - RNA, 21 nt, RNAi
uucugucggugaaagucuucg

SEQ ID NO: 45529 - DNA, 21 bp, homo sapiens
taaacaaccagttgagtcgac

SEQ ID NO: 45530 - RNA, 21 nt, RNAi
aacaaccaguugagucgacuu

SEQ ID NO: 45531 - RNA, 21 nt, RNAi
uuuuguuggucaacucagcug

SEQ ID NO: 45532 - DNA, 21 bp, homo sapiens
taccatcagtgattctgttgc

SEQ ID NO: 45533 - RNA, 21 nt, RNAi
ccaucagugauucuguugcuu

SEQ ID NO: 45534 - RNA, 21 nt, RNAi
uugguagucacuaagacaacg

SEQ ID NO: 45535 - DNA, 21 bp, homo sapiens
tatgacagatgacattcctga

SEQ ID NO: 45536 - RNA, 21 nt, RNAi
ugacagaugacauuccugauu

SEQ ID NO: 45537 - RNA, 21 nt, RNAi
uuacugucuacuguaaggacu

SEQ ID NO: 45538 - DNA, 21 bp, homo sapiens
tacaagaacagcctggtaccg

SEQ ID NO: 45539 - RNA, 21 nt, RNAi
caagaacagccugguaccguu

SEQ ID NO: 45540 - RNA, 21 nt, RNAi
uuguucuugucggaccauggc

SEQ ID NO: 45541 - DNA, 21 bp, homo sapiens
taccgcttgtttatccaaatt

SEQ ID NO: 45542 - RNA, 21 nt, RNAi
ccgcuuguuuauccaaauuuu

SEQ ID NO: 45543 - RNA, 21 nt, RNAi
uuggcgaacaaauagguuuaa

SEQ ID NO: 45544 - DNA, 21 bp, homo sapiens
taggatcaatagcagcagtgt

SEQ ID NO: 45545 - RNA, 21 nt, RNAi
ggaucaauagcagcaguguuu

SEQ ID NO: 45546 - RNA, 21 nt, RNAi
uuccuaguuaucgucgucaca

SEQ ID NO: 45547 - DNA, 21 bp, homo sapiens
tagcagcagtgttaagcagga

SEQ ID NO: 45548 - RNA, 21 nt, RNAi
gcagcaguguuaagcaggauu

SEQ ID NO: 45549 - RNA, 21 nt, RNAi
uucgucgucacaauucguccu

SEQ ID NO: 45550 - DNA, 21 bp, homo sapiens
taagcaggaagctacattctg

SEQ ID NO: 45551 - RNA, 21 nt, RNAi
agcaggaagcuacauucuguu

SEQ ID NO: 45552 - RNA, 21 nt, RNAi
uuucguccuucgauguaagac

SEQ ID NO: 45553 - DNA, 21 bp, homo sapiens
taatgcctcaatttccagctc

SEQ ID NO: 45554 - RNA, 21 nt, RNAi
augccucaauuuccagcucuu

SEQ ID NO: 45555 - RNA, 21 nt, RNAi
uuuacggaguuaaaggucgag

SEQ ID NO: 45556 - DNA, 21 bp, homo sapiens
tacttcttctccagtgaaatc

SEQ ID NO: 45557 - RNA, 21 nt, RNAi
cuucuucuccagugaaaucuu

SEQ ID NO: 45558 - RNA, 21 nt, RNAi
uugaagaagaggucacuuuag

SEQ ID NO: 45559 - DNA, 21 bp, homo sapiens
tactacatctatcactgatgc

SEQ ID NO: 45560 - RNA, 21 nt, RNAi
cuacaucuaucacugaugcuu

SEQ ID NO: 45561 - RNA, 21 nt, RNAi
uugauguagauagugacuacg

SEQ ID NO: 45562 - DNA, 21 bp, homo sapiens
tacatctatcactgatgctaa

SEQ ID NO: 45563 - RNA, 21 nt, RNAi
caucuaucacugaugcuaauu

SEQ ID NO: 45564 - RNA, 21 nt, RNAi
uuguagauagugacuacgauu

SEQ ID NO: 45565 - DNA, 21 bp, homo sapiens
tatcgaaaccaattgtgaagt

SEQ ID NO: 45566 - RNA, 21 nt, RNAi
ucgaaaccaauugugaaguuu

SEQ ID NO: 45567 - RNA, 21 nt, RNAi
uuagcuuugguuaacacuuca

SEQ ID NO: 45568 - DNA, 21 bp, homo sapiens
taagtagagaaatttgtctgc

SEQ ID NO: 45569 - RNA, 21 nt, RNAi
aguagagaaauuugucugcuu

SEQ ID NO: 45570 - RNA, 21 nt, RNAi
uuucaucucuuuaaacagacg

SEQ ID NO: 45571 - DNA, 21 bp, homo sapiens
tagagaaatttgtctgcaatc

SEQ ID NO: 45572 - RNA, 21 nt, RNAi
gagaaauuugucugcaaucuu

SEQ ID NO: 45573 - RNA, 21 nt, RNAi
uucucuuuaaacagacguuag

SEQ ID NO: 45574 - DNA, 21 bp, homo sapiens
taaagacaaatctacgacacc

SEQ ID NO: 45575 - RNA, 21 nt, RNAi
aagacaaaucuacgacaccuu

SEQ ID NO: 45576 - RNA, 21 nt, RNAi
uuuucuguuuagaugcugugg

SEQ ID NO: 45577 - DNA, 21 bp, homo sapiens
tacgacaccaggaggaacagg

SEQ ID NO: 45578 - RNA, 21 nt, RNAi
cgacaccaggaggaacagguu

SEQ ID NO: 45579 - RNA, 21 nt, RNAi
uugcugugguccuccuugucc

SEQ ID NO: 45580 - DNA, 21 bp, homo sapiens
taagcctttcctggaacgctt

SEQ ID NO: 45581 - RNA, 21 nt, RNAi
agccuuuccuggaacgcuuuu

SEQ ID NO: 45582 - RNA, 21 nt, RNAi
uuucggaaaggaccuugcgaa

SEQ ID NO: 45583 - DNA, 21 bp, homo sapiens
tagcaaagaaagtccagctcg

SEQ ID NO: 45584 - RNA, 21 nt, RNAi
gcaaagaaaguccagcucguu

SEQ ID NO: 45585 - RNA, 21 nt, RNAi
uucguuucuuucaggucgagc

SEQ ID NO: 45586 - DNA, 21 bp, homo sapiens
tattactccaaatacaaaggc

SEQ ID NO: 45587 - RNA, 21 nt, RNAi
uuacuccaaauacaaaggcuu

SEQ ID NO: 45588 - RNA, 21 nt, RNAi
uuaaugagguuuauguuuccg

SEQ ID NO: 45589 - DNA, 21 bp, homo sapiens
tactccaaatacaaaggccat

SEQ ID NO: 45590 - RNA, 21 nt, RNAi
cuccaaauacaaaggccauuu

SEQ ID NO: 45591 - RNA, 21 nt, RNAi
uugagguuuauguuuccggua

SEQ ID NO: 45592 - DNA, 21 bp, homo sapiens
tacaaaggccatccaagaaag

SEQ ID NO: 45593 - RNA, 21 nt, RNAi
caaaggccauccaagaaaguu

SEQ ID NO: 45594 - RNA, 21 nt, RNAi
uuguuuccgguagguucuuuc

SEQ ID NO: 45595 - DNA, 21 bp, homo sapiens
tattcaagcaagacacatctt

SEQ ID NO: 45596 - RNA, 21 nt, RNAi
uucaagcaagacacaucuuuu

SEQ ID NO: 45597 - RNA, 21 nt, RNAi
uuaaguucguucuguguagaa

SEQ ID NO: 45598 - DNA, 21 bp, homo sapiens
tagcacaacagctcaagcagg

SEQ ID NO: 45599 - RNA, 21 nt, RNAi
gcacaacagcucaagcagguu

SEQ ID NO: 45600 - RNA, 21 nt, RNAi
uucguguugucgaguucgucc

SEQ ID NO: 45601 - DNA, 21 bp, homo sapiens
tagcatgtcttcgtggccgat

SEQ ID NO: 45602 - RNA, 21 nt, RNAi
gcaugucuucguggccgauuu

SEQ ID NO: 45603 - RNA, 21 nt, RNAi
uucguacagaagcaccggcua

SEQ ID NO: 45604 - DNA, 21 bp, homo sapiens
tagaaaccaaacaggaaactc

SEQ ID NO: 45605 - RNA, 21 nt, RNAi
gaaaccaaacaggaaacucuu

SEQ ID NO: 45606 - RNA, 21 nt, RNAi
uucuuugguuuguccuuugag

SEQ ID NO: 45607 - DNA, 21 bp, homo sapiens
tacagaacctaaaggtttcac

SEQ ID NO: 45608 - RNA, 21 nt, RNAi
cagaaccuaaagguuucacuu

SEQ ID NO: 45609 - RNA, 21 nt, RNAi
uugucuuggauuuccaaagug

SEQ ID NO: 45610 - DNA, 21 bp, homo sapiens
taaaggtttcactgaatgcga

SEQ ID NO: 45611 - RNA, 21 nt, RNAi
aagguuucacugaaugcgauu

SEQ ID NO: 45612 - RNA, 21 nt, RNAi
uuuuccaaagugacuuacgcu

SEQ ID NO: 45613 - DNA, 21 bp, homo sapiens
tagaagaggacaaatccttaa

SEQ ID NO: 45614 - RNA, 21 nt, RNAi
gaagaggacaaauccuuaauu

SEQ ID NO: 45615 - RNA, 21 nt, RNAi
uucuucuccuguuuaggaauu

SEQ ID NO: 45616 - DNA, 21 bp, homo sapiens
tacgtgaaattgagatgagtg

SEQ ID NO: 45617 - RNA, 21 nt, RNAi
cgugaaauugagaugaguguu

SEQ ID NO: 45618 - RNA, 21 nt, RNAi
uugcacuuuaacucuacucac

SEQ ID NO: 45619 - DNA, 21 bp, homo sapiens
taattaatgacctcttcagtg

SEQ ID NO: 45620 - RNA, 21 nt, RNAi
auuaaugaccucuucaguguu

SEQ ID NO: 45621 - RNA, 21 nt, RNAi
uuuaauuacuggagaagucac

SEQ ID NO: 45622 - DNA, 21 bp, homo sapiens
taatgacctcttcagtgatgt

SEQ ID NO: 45623 - RNA, 21 nt, RNAi
augaccucuucagugauguuu

SEQ ID NO: 45624 - RNA, 21 nt, RNAi
uuuacuggagaagucacuaca

SEQ ID NO: 45625 - DNA, 21 bp, homo sapiens
tagaggaaggtgaactagata

SEQ ID NO: 45626 - RNA, 21 nt, RNAi
gaggaaggugaacuagauauu

SEQ ID NO: 45627 - RNA, 21 nt, RNAi
uucuccuuccacuugaucuau

SEQ ID NO: 45628 - DNA, 21 bp, homo sapiens
tagatatggagaagagccaag

SEQ ID NO: 45629 - RNA, 21 nt, RNAi
gauauggagaagagccaaguu

SEQ ID NO: 45630 - RNA, 21 nt, RNAi
uucuauaccucuucucgguuc

SEQ ID NO: 45631 - DNA, 21 bp, homo sapiens
tatggagaagagccaagagga

SEQ ID NO: 45632 - RNA, 21 nt, RNAi
uggagaagagccaagaggauu

SEQ ID NO: 45633 - RNA, 21 nt, RNAi
uuaccucuucucgguucuccu

SEQ ID NO: 45634 - DNA, 21 bp, homo sapiens
tagcagaaagcagcgaagaac

SEQ ID NO: 45635 - RNA, 21 nt, RNAi
gcagaaagcagcgaagaacuu

SEQ ID NO: 45636 - RNA, 21 nt, RNAi
uucgucuuucgucgcuucuug

SEQ ID NO: 45637 - DNA, 21 bp, homo sapiens
tatctcctcaatgtctttact

SEQ ID NO: 45638 - RNA, 21 nt, RNAi
ucuccucaaugucuuuacuuu

SEQ ID NO: 45639 - RNA, 21 nt, RNAi
uuagaggaguuacagaaauga

SEQ ID NO: 45640 - DNA, 21 bp, homo sapiens
tacttgcaccattggcacaaa

SEQ ID NO: 45641 - RNA, 21 nt, RNAi
cuugcaccauuggcacaaauu

SEQ ID NO: 45642 - RNA, 21 nt, RNAi
uugaacgugguaaccguguuu

SEQ ID NO: 45643 - DNA, 21 bp, homo sapiens
taagtccagagagtttagtgt

SEQ ID NO: 45644 - RNA, 21 nt, RNAi
aguccagagaguuuaguguuu

SEQ ID NO: 45645 - RNA, 21 nt, RNAi
uuucaggucucucaaaucaca

SEQ ID NO: 45646 - DNA, 21 bp, homo sapiens
tagtgtccacacctagactgg

SEQ ID NO: 45647 - RNA, 21 nt, RNAi
guguccacaccuagacugguu

SEQ ID NO: 45648 - RNA, 21 nt, RNAi
uucacagguguggaucugacc

SEQ ID NO: 45649 - DNA, 21 bp, homo sapiens
tagactggaattgaaagacac

SEQ ID NO: 45650 - RNA, 21 nt, RNAi
gacuggaauugaaagacacuu

SEQ ID NO: 45651 - RNA, 21 nt, RNAi
uucugaccuuaacuuucugug

SEQ ID NO: 45652 - DNA, 21 bp, homo sapiens
tagccttggttctgaagatcg

SEQ ID NO: 45653 - RNA, 21 nt, RNAi
gccuugguucugaagaucguu

SEQ ID NO: 45654 - RNA, 21 nt, RNAi
uucggaaccaagacuucuagc

SEQ ID NO: 45655 - DNA, 21 bp, homo sapiens
tacagcattgatgcatataga

SEQ ID NO: 45656 - RNA, 21 nt, RNAi
cagcauugaugcauauagauu

SEQ ID NO: 45657 - RNA, 21 nt, RNAi
uugucguaacuacguauaucu

SEQ ID NO: 45658 - DNA, 21 bp, homo sapiens
taaagcaggtgattgttcgga

SEQ ID NO: 45659 - RNA, 21 nt, RNAi
aagcaggugauuguucggauu

SEQ ID NO: 45660 - RNA, 21 nt, RNAi
uuuucguccacuaacaagccu

SEQ ID NO: 45661 - DNA, 21 bp, homo sapiens
taatgcctttccttgtcaagt

SEQ ID NO: 45662 - RNA, 21 nt, RNAi
augccuuuccuugucaaguuu

SEQ ID NO: 45663 - RNA, 21 nt, RNAi
uuuacggaaaggaacaguuca

SEQ ID NO: 45664 - DNA, 21 bp, homo sapiens
taaatatgcaacagacagtga

SEQ ID NO: 45665 - RNA, 21 nt, RNAi
aauaugcaacagacagugauu

SEQ ID NO: 45666 - RNA, 21 nt, RNAi
uuuuauacguugucugucacu

SEQ ID NO: 45667 - DNA, 21 bp, homo sapiens
tatgcaacagacagtgatcta

SEQ ID NO: 45668 - RNA, 21 nt, RNAi
ugcaacagacagugaucuauu

SEQ ID NO: 45669 - RNA, 21 nt, RNAi
uuacguugucugucacuagau

SEQ ID NO: 45670 - DNA, 21 bp, homo sapiens
tatcaagctagccaggctctt

SEQ ID NO: 45671 - RNA, 21 nt, RNAi
ucaagcuagccaggcucuuuu

SEQ ID NO: 45672 - RNA, 21 nt, RNAi
uuaguucgaucgguccgagaa

SEQ ID NO: 45673 - DNA, 21 bp, homo sapiens
tagccaggctcttaactgctg

SEQ ID NO: 45674 - RNA, 21 nt, RNAi
gccaggcucuuaacugcuguu

SEQ ID NO: 45675 - RNA, 21 nt, RNAi
uucgguccgagaauugacgac

SEQ ID NO: 45676 - DNA, 21 bp, homo sapiens
taactgctgtgttgatgaaga

SEQ ID NO: 45677 - RNA, 21 nt, RNAi
acugcuguguugaugaagauu

SEQ ID NO: 45678 - RNA, 21 nt, RNAi
uuugacgacacaacuacuucu

SEQ ID NO: 45679 - DNA, 21 bp, homo sapiens
tagaagaagctgaagcagaaa

SEQ ID NO: 45680 - RNA, 21 nt, RNAi
gaagaagcugaagcagaaauu

SEQ ID NO: 45681 - RNA, 21 nt, RNAi
uucuucuucgacuucgucuuu

SEQ ID NO: 45682 - DNA, 21 bp, homo sapiens
taaattgaagaacgaaggacc

SEQ ID NO: 45683 - RNA, 21 nt, RNAi
aauugaagaacgaaggaccuu

SEQ ID NO: 45684 - RNA, 21 nt, RNAi
uuuuaacuucuugcuuccugg

SEQ ID NO: 45685 - DNA, 21 bp, homo sapiens
tatgccatccaaaggatcagt

SEQ ID NO: 45686 - RNA, 21 nt, RNAi
ugccauccaaaggaucaguuu

SEQ ID NO: 45687 - RNA, 21 nt, RNAi
uuacgguagguuuccuaguca

SEQ ID NO: 45688 - DNA, 21 bp, homo sapiens
tactttgtcagaaatccgctt

SEQ ID NO: 45689 - RNA, 21 nt, RNAi
cuuugucagaaauccgcuuuu

SEQ ID NO: 45690 - RNA, 21 nt, RNAi
uugaaacagucuuuaggcgaa

SEQ ID NO: 45691 - DNA, 21 bp, homo sapiens
tacggttcagaaaccagatgc

SEQ ID NO: 45692 - RNA, 21 nt, RNAi
cgguucagaaaccagaugcuu

SEQ ID NO: 45693 - RNA, 21 nt, RNAi
uugccaagucuuuggucuacg

SEQ ID NO: 45694 - DNA, 21 bp, homo sapiens
tatggtagccacaccattagc

SEQ ID NO: 45695 - RNA, 21 nt, RNAi
ugguagccacaccauuagcuu

SEQ ID NO: 45696 - RNA, 21 nt, RNAi
uuaccaucggugugguaaucg

SEQ ID NO: 45697 - DNA, 21 bp, homo sapiens
tagccacaccattagcaagta

SEQ ID NO: 45698 - RNA, 21 nt, RNAi
gccacaccauuagcaaguauu

SEQ ID NO: 45699 - RNA, 21 nt, RNAi
uucggugugguaaucguucau

SEQ ID NO: 45700 - DNA, 21 bp, homo sapiens
tagcaagtacttcaaactctc

SEQ ID NO: 45701 - RNA, 21 nt, RNAi
gcaaguacuucaaacucucuu

SEQ ID NO: 45702 - RNA, 21 nt, RNAi
uucguucaugaaguuugagag

SEQ ID NO: 45703 - DNA, 21 bp, homo sapiens
tacttcaaactctcttaacgg

SEQ ID NO: 45704 - RNA, 21 nt, RNAi
cuucaaacucucuuaacgguu

SEQ ID NO: 45705 - RNA, 21 nt, RNAi
uugaaguuugagagaauugcc

SEQ ID NO: 45706 - DNA, 21 bp, homo sapiens
taacggtgatgctctgacatt

SEQ ID NO: 45707 - RNA, 21 nt, RNAi
acggugaugcucugacauuuu

SEQ ID NO: 45708 - RNA, 21 nt, RNAi
uuugccacuacgagacuguaa

SEQ ID NO: 45709 - DNA, 21 bp, homo sapiens
tactacatttactctgcaaga

SEQ ID NO: 45710 - RNA, 21 nt, RNAi
cuacauuuacucugcaagauu

SEQ ID NO: 45711 - RNA, 21 nt, RNAi
uugauguaaaugagacguucu

SEQ ID NO: 45712 - DNA, 21 bp, homo sapiens
tacatttactctgcaagatgt

SEQ ID NO: 45713 - RNA, 21 nt, RNAi
cauuuacucugcaagauguuu

SEQ ID NO: 45714 - RNA, 21 nt, RNAi
uuguaaaugagacguucuaca

SEQ ID NO: 45715 - DNA, 21 bp, homo sapiens
tactctgcaagatgtatccaa

SEQ ID NO: 45716 - RNA, 21 nt, RNAi
cucugcaagauguauccaauu

SEQ ID NO: 45717 - RNA, 21 nt, RNAi
uugagacguucuacauagguu

SEQ ID NO: 45718 - DNA, 21 bp, homo sapiens
tattgaagtttacagcttggt

SEQ ID NO: 45719 - RNA, 21 nt, RNAi
uugaaguuuacagcuugguuu

SEQ ID NO: 45720 - RNA, 21 nt, RNAi
uuaacuucaaaugucgaacca

SEQ ID NO: 45721 - DNA, 21 bp, homo sapiens
tattactccaaagcgactcct

SEQ ID NO: 45722 - RNA, 21 nt, RNAi
uuacuccaaagcgacuccuuu

SEQ ID NO: 45723 - RNA, 21 nt, RNAi
uuaaugagguuucgcugagga

SEQ ID NO: 45724 - DNA, 21 bp, homo sapiens
tactccaaagcgactcctcac

SEQ ID NO: 45725 - RNA, 21 nt, RNAi
cuccaaagcgacuccucacuu

SEQ ID NO: 45726 - RNA, 21 nt, RNAi
uugagguuucgcugaggagug

SEQ ID NO: 45727 - DNA, 21 bp, homo sapiens
tagtgctgtgcgaaccagcaa

SEQ ID NO: 45728 - RNA, 21 nt, RNAi
gugcugugcgaaccagcaauu

SEQ ID NO: 45729 - RNA, 21 nt, RNAi
uucacgacacgcuuggucguu

SEQ ID NO: 45730 - DNA, 21 bp, homo sapiens
tatcattgtcttcagtaggaa

SEQ ID NO: 45731 - RNA, 21 nt, RNAi
ucauugucuucaguaggaauu

SEQ ID NO: 45732 - RNA, 21 nt, RNAi
uuaguaacagaagucauccuu

SEQ ID NO: 45733 - DNA, 21 bp, homo sapiens
tactaagtttgttctggacaa

SEQ ID NO: 45734 - RNA, 21 nt, RNAi
cuaaguuuguucuggacaauu

SEQ ID NO: 45735 - RNA, 21 nt, RNAi
uugauucaaacaagaccuguu

SEQ ID NO: 45736 - DNA, 21 bp, homo sapiens
taagtttgttctggacaaggt

SEQ ID NO: 45737 - RNA, 21 nt, RNAi
aguuuguucuggacaagguuu

SEQ ID NO: 45738 - RNA, 21 nt, RNAi
uuucaaacaagaccuguucca

SEQ ID NO: 45739 - DNA, 21 bp, homo sapiens
tatcttctttggaaggtcata

SEQ ID NO: 45740 - RNA, 21 nt, RNAi
ucuucuuuggaaggucauauu

SEQ ID NO: 45741 - RNA, 21 nt, RNAi
uuagaagaaaccuuccaguau

SEQ ID NO: 45742 - DNA, 21 bp, homo sapiens
tatcttattggacttatccag

SEQ ID NO: 45743 - RNA, 21 nt, RNAi
ucuuauuggacuuauccaguu

SEQ ID NO: 45744 - RNA, 21 nt, RNAi
uuagaauaaccugaauagguc

SEQ ID NO: 45745 - DNA, 21 bp, homo sapiens
tattggacttatccagatgat

SEQ ID NO: 45746 - RNA, 21 nt, RNAi
uuggacuuauccagaugauuu

SEQ ID NO: 45747 - RNA, 21 nt, RNAi
uuaaccugaauaggucuacua

SEQ ID NO: 45748 - DNA, 21 bp, homo sapiens
tatccagatgatgagaaacgc

SEQ ID NO: 45749 - RNA, 21 nt, RNAi
uccagaugaugagaaacgcuu

SEQ ID NO: 45750 - RNA, 21 nt, RNAi
uuaggucuacuacucuuugcg

SEQ ID NO: 45751 - DNA, 21 bp, homo sapiens
taggaaggataaatctggcta

SEQ ID NO: 45752 - RNA, 21 nt, RNAi
ggaaggauaaaucuggcuauu

SEQ ID NO: 45753 - RNA, 21 nt, RNAi
uuccuuccuauuuagaccgau

SEQ ID NO: 45754 - DNA, 21 bp, homo sapiens
taaatctggctaattgtacca

SEQ ID NO: 45755 - RNA, 21 nt, RNAi
aaucuggcuaauuguaccauu

SEQ ID NO: 45756 - RNA, 21 nt, RNAi
uuuuagaccgauuaacauggu

SEQ ID NO: 45757 - DNA, 21 bp, homo sapiens
taattgtaccagtcgtcagat

SEQ ID NO: 45758 - RNA, 21 nt, RNAi
auuguaccagucgucagauuu

SEQ ID NO: 45759 - RNA, 21 nt, RNAi
uuuaacauggucagcagucua

SEQ ID NO: 45760 - DNA, 21 bp, homo sapiens
taccagtcgtcagatagaacc

SEQ ID NO: 45761 - RNA, 21 nt, RNAi
ccagucgucagauagaaccuu

SEQ ID NO: 45762 - RNA, 21 nt, RNAi
uuggucagcagucuaucuugg

SEQ ID NO: 45763 - DNA, 21 bp, homo sapiens
tagaaccagccaacagagaat

SEQ ID NO: 45764 - RNA, 21 nt, RNAi
gaaccagccaacagagaauuu

SEQ ID NO: 45765 - RNA, 21 nt, RNAi
uucuuggucgguugucucuua

SEQ ID NO: 45766 - DNA, 21 bp, homo sapiens
taattactgtccgaccacaaa

SEQ ID NO: 45767 - RNA, 21 nt, RNAi
auuacuguccgaccacaaauu

SEQ ID NO: 45768 - RNA, 21 nt, RNAi
uuuaaugacaggcugguguuu

SEQ ID NO: 45769 - DNA, 21 bp, homo sapiens
tactgtccgaccacaaagaga

SEQ ID NO: 45770 - RNA, 21 nt, RNAi
cuguccgaccacaaagagauu

SEQ ID NO: 45771 - RNA, 21 nt, RNAi
uugacaggcugguguuucucu

SEQ ID NO: 45772 - DNA, 21 bp, homo sapiens
taccaagaactggctgtctgc

SEQ ID NO: 45773 - RNA, 21 nt, RNAi
ccaagaacuggcugucugcuu

SEQ ID NO: 45774 - RNA, 21 nt, RNAi
uugguucuugaccgacagacg

SEQ ID NO: 45775 - DNA, 21 bp, homo sapiens
tattcgcctctggcaacctga

SEQ ID NO: 45776 - RNA, 21 nt, RNAi
uucgccucuggcaaccugauu

SEQ ID NO: 45777 - RNA, 21 nt, RNAi
uuaagcggagaccguuggacu

SEQ ID NO: 45778 - DNA, 21 bp, homo sapiens
tacaaacctattggaaagcct

SEQ ID NO: 45779 - RNA, 21 nt, RNAi
caaaccuauuggaaagccuuu

SEQ ID NO: 45780 - RNA, 21 nt, RNAi
uuguuuggauaaccuuucgga

SEQ ID NO: 45781 - DNA, 21 bp, homo sapiens
tattggaaagccttaaactgg

SEQ ID NO: 45782 - RNA, 21 nt, RNAi
uuggaaagccuuaaacugguu

SEQ ID NO: 45783 - RNA, 21 nt, RNAi
uuaaccuuucggaauuugacc

SEQ ID NO: 45784 - DNA, 21 bp, homo sapiens
taagaaacacacttaagagca

SEQ ID NO: 45785 - RNA, 21 nt, RNAi
agaaacacacuuaagagcauu

SEQ ID NO: 45786 - RNA, 21 nt, RNAi
uuucuuugugugaauucucgu

SEQ ID NO: 45787 - DNA, 21 bp, homo sapiens
taagagcatcagatttactga

SEQ ID NO: 45788 - RNA, 21 nt, RNAi
agagcaucagauuuacugauu

SEQ ID NO: 45789 - RNA, 21 nt, RNAi
uuucucguagucuaaaugacu

SEQ ID NO: 45790 - DNA, 21 bp, homo sapiens
tattcactacgtattatgcag

SEQ ID NO: 45791 - RNA, 21 nt, RNAi
uucacuacguauuaugcaguu

SEQ ID NO: 45792 - RNA, 21 nt, RNAi
uuaagugaugcauaauacguc

SEQ ID NO: 45793 - DNA, 21 bp, homo sapiens
taggtcttgaagcagcaacgt

SEQ ID NO: 45794 - RNA, 21 nt, RNAi
ggucuugaagcagcaacguuu

SEQ ID NO: 45795 - RNA, 21 nt, RNAi
uuccagaacuucgucguugca

SEQ ID NO: 45796 - DNA, 21 bp, homo sapiens
tattgatcgtgatatgacttg

SEQ ID NO: 45797 - RNA, 21 nt, RNAi
uugaucgugauaugacuuguu

SEQ ID NO: 45798 - RNA, 21 nt, RNAi
uuaacuagcacuauacugaac

SEQ ID NO: 45799 - DNA, 21 bp, homo sapiens
taaggcctttacagaaacatt

SEQ ID NO: 45800 - RNA, 21 nt, RNAi
aggccuuuacagaaacauuuu

SEQ ID NO: 45801 - RNA, 21 nt, RNAi
uuuccggaaaugucuuuguaa

SEQ ID NO: 45802 - DNA, 21 bp, homo sapiens
tagtaatgaggatgagaactt

SEQ ID NO: 45803 - RNA, 21 nt, RNAi
guaaugaggaugagaacuuuu

SEQ ID NO: 45804 - RNA, 21 nt, RNAi
uucauuacuccuacucuugaa

SEQ ID NO: 45805 - DNA, 21 bp, homo sapiens
aaggtctatgactcatgctaa

SEQ ID NO: 45806 - RNA, 21 nt, RNAi
ggucuaugacucaugcuaauu

SEQ ID NO: 45807 - RNA, 21 nt, RNAi
uuccagauacugaguacgauu

SEQ ID NO: 45808 - DNA, 21 bp, homo sapiens
aataaacaaccagttgagtcg

SEQ ID NO: 45809 - RNA, 21 nt, RNAi
uaaacaaccaguugagucguu

SEQ ID NO: 45810 - RNA, 21 nt, RNAi
uuauuuguuggucaacucagc

SEQ ID NO: 45811 - DNA, 21 bp, homo sapiens
aaacaaccagttgagtcgaca

SEQ ID NO: 45812 - RNA, 21 nt, RNAi
acaaccaguugagucgacauu

SEQ ID NO: 45813 - RNA, 21 nt, RNAi
uuuguuggucaacucagcugu

SEQ ID NO: 45814 - DNA, 21 bp, homo sapiens
aacaaccagttgagtcgacat

SEQ ID NO: 45815 - RNA, 21 nt, RNAi
caaccaguugagucgacauuu

SEQ ID NO: 45816 - RNA, 21 nt, RNAi
uuguuggucaacucagcugua

SEQ ID NO: 45817 - DNA, 21 bp, homo sapiens
aatcttgccgcaactatttgc

SEQ ID NO: 45818 - RNA, 21 nt, RNAi
ucuugccgcaacuauuugcuu

SEQ ID NO: 45819 - RNA, 21 nt, RNAi
uuagaacggcguugauaaacg

SEQ ID NO: 45820 - DNA, 21 bp, homo sapiens
aaacagtgtacaagaacagcc

SEQ ID NO: 45821 - RNA, 21 nt, RNAi
acaguguacaagaacagccuu

SEQ ID NO: 45822 - RNA, 21 nt, RNAi
uuugucacauguucuugucgg

SEQ ID NO: 45823 - DNA, 21 bp, homo sapiens
aagtgctgatgatgcgtcttt

SEQ ID NO: 45824 - RNA, 21 nt, RNAi
gugcugaugaugcgucuuuuu

SEQ ID NO: 45825 - RNA, 21 nt, RNAi
uucacgacuacuacgcagaaa

SEQ ID NO: 45826 - DNA, 21 bp, homo sapiens
aaatcctgagctacttccaaa

SEQ ID NO: 45827 - RNA, 21 nt, RNAi
auccugagcuacuuccaaauu

SEQ ID NO: 45828 - RNA, 21 nt, RNAi
uuuaggacucgaugaagguuu

SEQ ID NO: 45829 - DNA, 21 bp, homo sapiens
aaactcctattagtcctctga

SEQ ID NO: 45830 - RNA, 21 nt, RNAi
acuccuauuaguccucugauu

SEQ ID NO: 45831 - RNA, 21 nt, RNAi
uuugaggauaaucaggagacu

SEQ ID NO: 45832 - DNA, 21 bp, homo sapiens
aactcctattagtcctctgaa

SEQ ID NO: 45833 - RNA, 21 nt, RNAi
cuccuauuaguccucugaauu

SEQ ID NO: 45834 - RNA, 21 nt, RNAi
uugaggauaaucaggagacuu

SEQ ID NO: 45835 - DNA, 21 bp, homo sapiens
aaatctacgacaccaggagga

SEQ ID NO: 45836 - RNA, 21 nt, RNAi
aucuacgacaccaggaggauu

SEQ ID NO: 45837 - RNA, 21 nt, RNAi
uuuagaugcugugguccuccu

SEQ ID NO: 45838 - DNA, 21 bp, homo sapiens
aatctacgacaccaggaggaa

SEQ ID NO: 45839 - RNA, 21 nt, RNAi
ucuacgacaccaggaggaauu

SEQ ID NO: 45840 - RNA, 21 nt, RNAi
uuagaugcugugguccuccuu

SEQ ID NO: 45841 - DNA, 21 bp, homo sapiens
aaagaactagcatgtcttcgt

SEQ ID NO: 45842 - RNA, 21 nt, RNAi
agaacuagcaugucuucguuu

SEQ ID NO: 45843 - RNA, 21 nt, RNAi
uuucuugaucguacagaagca

SEQ ID NO: 45844 - DNA, 21 bp, homo sapiens
aagaactagcatgtcttcgtg

SEQ ID NO: 45845 - RNA, 21 nt, RNAi
gaacuagcaugucuucguguu

SEQ ID NO: 45846 - RNA, 21 nt, RNAi
uucuugaucguacagaagcac

SEQ ID NO: 45847 - DNA, 21 bp, homo sapiens
aattccagtacagaacctaaa

SEQ ID NO: 45848 - RNA, 21 nt, RNAi
uuccaguacagaaccuaaauu

SEQ ID NO: 45849 - RNA, 21 nt, RNAi
uuaaggucaugucuuggauuu

SEQ ID NO: 45850 - DNA, 21 bp, homo sapiens
aaaggtttcactgaatgcgaa

SEQ ID NO: 45851 - RNA, 21 nt, RNAi
agguuucacugaaugcgaauu

SEQ ID NO: 45852 - RNA, 21 nt, RNAi
uuuccaaagugacuuacgcuu

SEQ ID NO: 45853 - DNA, 21 bp, homo sapiens
aaggtttcactgaatgcgaaa

SEQ ID NO: 45854 - RNA, 21 nt, RNAi
gguuucacugaaugcgaaauu

SEQ ID NO: 45855 - RNA, 21 nt, RNAi
uuccaaagugacuuacgcuuu

SEQ ID NO: 45856 - DNA, 21 bp, homo sapiens
aagtgatacgtgaaattgaga

SEQ ID NO: 45857 - RNA, 21 nt, RNAi
gugauacgugaaauugagauu

SEQ ID NO: 45858 - RNA, 21 nt, RNAi
uucacuaugcacuuuaacucu

SEQ ID NO: 45859 - DNA, 21 bp, homo sapiens
aaggtgaactagatatggaga

SEQ ID NO: 45860 - RNA, 21 nt, RNAi
ggugaacuagauauggagauu

SEQ ID NO: 45861 - RNA, 21 nt, RNAi
uuccacuugaucuauaccucu

SEQ ID NO: 45862 - DNA, 21 bp, homo sapiens
aagcattagcagaaagcagcg

SEQ ID NO: 45863 - RNA, 21 nt, RNAi
gcauuagcagaaagcagcguu

SEQ ID NO: 45864 - RNA, 21 nt, RNAi
uucguaaucgucuuucgucgc

SEQ ID NO: 45865 - DNA, 21 bp, homo sapiens
aagatgcactgaatatctcct

SEQ ID NO: 45866 - RNA, 21 nt, RNAi
gaugcacugaauaucuccuuu

SEQ ID NO: 45867 - RNA, 21 nt, RNAi
uucuacgugacuuauagagga

SEQ ID NO: 45868 - DNA, 21 bp, homo sapiens
aaacagttggtgtggtaagtc

SEQ ID NO: 45869 - RNA, 21 nt, RNAi
acaguuggugugguaagucuu

SEQ ID NO: 45870 - RNA, 21 nt, RNAi
uuugucaaccacaccauucag

SEQ ID NO: 45871 - DNA, 21 bp, homo sapiens
aacagttggtgtggtaagtcc

SEQ ID NO: 45872 - RNA, 21 nt, RNAi
caguuggugugguaaguccuu

SEQ ID NO: 45873 - RNA, 21 nt, RNAi
uugucaaccacaccauucagg

SEQ ID NO: 45874 - DNA, 21 bp, homo sapiens
aatctggtgatagccttggtt

SEQ ID NO: 45875 - RNA, 21 nt, RNAi
ucuggugauagccuugguuuu

SEQ ID NO: 45876 - RNA, 21 nt, RNAi
uuagaccacuaucggaaccaa

SEQ ID NO: 45877 - DNA, 21 bp, homo sapiens
aagatcgtgatcttctttaca

SEQ ID NO: 45878 - RNA, 21 nt, RNAi
gaucgugaucuucuuuacauu

SEQ ID NO: 45879 - RNA, 21 nt, RNAi
uucuagcacuagaagaaaugu

SEQ ID NO: 45880 - DNA, 21 bp, homo sapiens
aaagcaggtgattgttcggaa

SEQ ID NO: 45881 - RNA, 21 nt, RNAi
agcaggugauuguucggaauu

SEQ ID NO: 45882 - RNA, 21 nt, RNAi
uuucguccacuaacaagccuu

SEQ ID NO: 45883 - DNA, 21 bp, homo sapiens
aagcaggtgattgttcggaag

SEQ ID NO: 45884 - RNA, 21 nt, RNAi
gcaggugauuguucggaaguu

SEQ ID NO: 45885 - RNA, 21 nt, RNAi
uucguccacuaacaagccuuc

SEQ ID NO: 45886 - DNA, 21 bp, homo sapiens
aaataatgcctttccttgtca

SEQ ID NO: 45887 - RNA, 21 nt, RNAi
auaaugccuuuccuugucauu

SEQ ID NO: 45888 - RNA, 21 nt, RNAi
uuuauuacggaaaggaacagu

SEQ ID NO: 45889 - DNA, 21 bp, homo sapiens
aataatgcctttccttgtcaa

SEQ ID NO: 45890 - RNA, 21 nt, RNAi
uaaugccuuuccuugucaauu

SEQ ID NO: 45891 - RNA, 21 nt, RNAi
uuauuacggaaaggaacaguu

SEQ ID NO: 45892 - DNA, 21 bp, homo sapiens
aagacttcttctaattgcaac

SEQ ID NO: 45893 - RNA, 21 nt, RNAi
gacuucuucuaauugcaacuu

SEQ ID NO: 45894 - RNA, 21 nt, RNAi
uucugaagaagauuaacguug

SEQ ID NO: 45895 - DNA, 21 bp, homo sapiens
aattgaagaacgaaggacctc

SEQ ID NO: 45896 - RNA, 21 nt, RNAi
uugaagaacgaaggaccucuu

SEQ ID NO: 45897 - RNA, 21 nt, RNAi
uuaacuucuugcuuccuggag

SEQ ID NO: 45898 - DNA, 21 bp, homo sapiens
aatttatgccatccaaaggat

SEQ ID NO: 45899 - RNA, 21 nt, RNAi
uuuaugccauccaaaggauuu

SEQ ID NO: 45900 - RNA, 21 nt, RNAi
uuaaauacgguagguuuccua

SEQ ID NO: 45901 - DNA, 21 bp, homo sapiens
aaactctcttaacggtgatgc

SEQ ID NO: 45902 - RNA, 21 nt, RNAi
acucucuuaacggugaugcuu

SEQ ID NO: 45903 - RNA, 21 nt, RNAi
uuugagagaauugccacuacg

SEQ ID NO: 45904 - DNA, 21 bp, homo sapiens
aactctcttaacggtgatgct

SEQ ID NO: 45905 - RNA, 21 nt, RNAi
cucucuuaacggugaugcuuu

SEQ ID NO: 45906 - RNA, 21 nt, RNAi
uugagagaauugccacuacga

SEQ ID NO: 45907 - DNA, 21 bp, homo sapiens
aagtttacagcttggtgcaaa

SEQ ID NO: 45908 - RNA, 21 nt, RNAi
guuuacagcuuggugcaaauu

SEQ ID NO: 45909 - RNA, 21 nt, RNAi
uucaaaugucgaaccacguuu

SEQ ID NO: 45910 - DNA, 21 bp, homo sapiens
aagtccaaggctattactcca

SEQ ID NO: 45911 - RNA, 21 nt, RNAi
guccaaggcuauuacuccauu

SEQ ID NO: 45912 - RNA, 21 nt, RNAi
uucagguuccgauaaugaggu

SEQ ID NO: 45913 - DNA, 21 bp, homo sapiens
aaggataaatctggctaattg

SEQ ID NO: 45914 - RNA, 21 nt, RNAi
ggauaaaucuggcuaauuguu

SEQ ID NO: 45915 - RNA, 21 nt, RNAi
uuccuauuuagaccgauuaac

SEQ ID NO: 45916 - DNA, 21 bp, homo sapiens
aaatctggctaattgtaccag

SEQ ID NO: 45917 - RNA, 21 nt, RNAi
aucuggcuaauuguaccaguu

SEQ ID NO: 45918 - RNA, 21 nt, RNAi
uuuagaccgauuaacaugguc

SEQ ID NO: 45919 - DNA, 21 bp, homo sapiens
aatctggctaattgtaccagt

SEQ ID NO: 45920 - RNA, 21 nt, RNAi
ucuggcuaauuguaccaguuu

SEQ ID NO: 45921 - RNA, 21 nt, RNAi
uuagaccgauuaacaugguca

SEQ ID NO: 45922 - DNA, 21 bp, homo sapiens
aattgtaccagtcgtcagata

SEQ ID NO: 45923 - RNA, 21 nt, RNAi
uuguaccagucgucagauauu

SEQ ID NO: 45924 - RNA, 21 nt, RNAi
uuaacauggucagcagucuau

SEQ ID NO: 45925 - DNA, 21 bp, homo sapiens
aagatgaccgagagactcttg

SEQ ID NO: 45926 - RNA, 21 nt, RNAi
gaugaccgagagacucuuguu

SEQ ID NO: 45927 - RNA, 21 nt, RNAi
uucuacuggcucucugagaac

SEQ ID NO: 45928 - DNA, 21 bp, homo sapiens
caaggtctatgactcatgcta

SEQ ID NO: 45929 - RNA, 21 nt, RNAi
aggucuaugacucaugcuauu

SEQ ID NO: 45930 - RNA, 21 nt, RNAi
uuuccagauacugaguacgau

SEQ ID NO: 45931 - DNA, 21 bp, homo sapiens
catgctaagcgagctagacag

SEQ ID NO: 45932 - RNA, 21 nt, RNAi
ugcuaagcgagcuagacaguu

SEQ ID NO: 45933 - RNA, 21 nt, RNAi
uuacgauucgcucgaucuguc

SEQ ID NO: 45934 - DNA, 21 bp, homo sapiens
caatcttgccgcaactatttg

SEQ ID NO: 45935 - RNA, 21 nt, RNAi
aucuugccgcaacuauuuguu

SEQ ID NO: 45936 - RNA, 21 nt, RNAi
uuuagaacggcguugauaaac

SEQ ID NO: 45937 - DNA, 21 bp, homo sapiens
cagcctggtaccgcttgttta

SEQ ID NO: 45938 - RNA, 21 nt, RNAi
gccugguaccgcuuguuuauu

SEQ ID NO: 45939 - RNA, 21 nt, RNAi
uucggaccauggcgaacaaau

SEQ ID NO: 45940 - DNA, 21 bp, homo sapiens
cagcagtgttaagcaggaagc

SEQ ID NO: 45941 - RNA, 21 nt, RNAi
gcaguguuaagcaggaagcuu

SEQ ID NO: 45942 - RNA, 21 nt, RNAi
uucgucacaauucguccuucg

SEQ ID NO: 45943 - DNA, 21 bp, homo sapiens
cagtgttaagcaggaagctac

SEQ ID NO: 45944 - RNA, 21 nt, RNAi
guguuaagcaggaagcuacuu

SEQ ID NO: 45945 - RNA, 21 nt, RNAi
uucacaauucguccuucgaug

SEQ ID NO: 45946 - DNA, 21 bp, homo sapiens
caggaagctacattctgttcc

SEQ ID NO: 45947 - RNA, 21 nt, RNAi
ggaagcuacauucuguuccuu

SEQ ID NO: 45948 - RNA, 21 nt, RNAi
uuccuucgauguaagacaagg

SEQ ID NO: 45949 - DNA, 21 bp, homo sapiens
caagtgctgatgatgcgtctt

SEQ ID NO: 45950 - RNA, 21 nt, RNAi
agugcugaugaugcgucuuuu

SEQ ID NO: 45951 - RNA, 21 nt, RNAi
uuucacgacuacuacgcagaa

SEQ ID NO: 45952 - DNA, 21 bp, homo sapiens
caaatctacgacaccaggagg

SEQ ID NO: 45953 - RNA, 21 nt, RNAi
aaucuacgacaccaggagguu

SEQ ID NO: 45954 - RNA, 21 nt, RNAi
uuuuagaugcugugguccucc

SEQ ID NO: 45955 - DNA, 21 bp, homo sapiens
caggaattaagcctttcctgg

SEQ ID NO: 45956 - RNA, 21 nt, RNAi
ggaauuaagccuuuccugguu

SEQ ID NO: 45957 - RNA, 21 nt, RNAi
uuccuuaauucggaaaggacc

SEQ ID NO: 45958 - DNA, 21 bp, homo sapiens
caaatacaaaggccatccaag

SEQ ID NO: 45959 - RNA, 21 nt, RNAi
aauacaaaggccauccaaguu

SEQ ID NO: 45960 - RNA, 21 nt, RNAi
uuuuauguuuccgguagguuc

SEQ ID NO: 45961 - DNA, 21 bp, homo sapiens
catgtcttcgtggccgatttg

SEQ ID NO: 45962 - RNA, 21 nt, RNAi
ugucuucguggccgauuuguu

SEQ ID NO: 45963 - RNA, 21 nt, RNAi
uuacagaagcaccggcuaaac

SEQ ID NO: 45964 - DNA, 21 bp, homo sapiens
caaacaggaaactcactgtca

SEQ ID NO: 45965 - RNA, 21 nt, RNAi
aacaggaaacucacugucauu

SEQ ID NO: 45966 - RNA, 21 nt, RNAi
uuuuguccuuugagugacagu

SEQ ID NO: 45967 - DNA, 21 bp, homo sapiens
cactgaatgcgaaatgacgaa

SEQ ID NO: 45968 - RNA, 21 nt, RNAi
cugaaugcgaaaugacgaauu

SEQ ID NO: 45969 - RNA, 21 nt, RNAi
uugacuuacgcuuuacugcuu

SEQ ID NO: 45970 - DNA, 21 bp, homo sapiens
caagcattagcagaaagcagc

SEQ ID NO: 45971 - RNA, 21 nt, RNAi
agcauuagcagaaagcagcuu

SEQ ID NO: 45972 - RNA, 21 nt, RNAi
uuucguaaucgucuuucgucg

SEQ ID NO: 45973 - DNA, 21 bp, homo sapiens
cactgaatatctcctcaatgt

SEQ ID NO: 45974 - RNA, 21 nt, RNAi
cugaauaucuccucaauguuu

SEQ ID NO: 45975 - RNA, 21 nt, RNAi
uugacuuauagaggaguuaca

SEQ ID NO: 45976 - DNA, 21 bp, homo sapiens
cacaaacagttggtgtggtaa

SEQ ID NO: 45977 - RNA, 21 nt, RNAi
caaacaguuggugugguaauu

SEQ ID NO: 45978 - RNA, 21 nt, RNAi
uuguuugucaaccacaccauu

SEQ ID NO: 45979 - DNA, 21 bp, homo sapiens
caaacagttggtgtggtaagt

SEQ ID NO: 45980 - RNA, 21 nt, RNAi
aacaguuggugugguaaguuu

SEQ ID NO: 45981 - RNA, 21 nt, RNAi
uuuugucaaccacaccauuca

SEQ ID NO: 45982 - DNA, 21 bp, homo sapiens
cacacctagactggaattgaa

SEQ ID NO: 45983 - RNA, 21 nt, RNAi
caccuagacuggaauugaauu

SEQ ID NO: 45984 - RNA, 21 nt, RNAi
uuguggaucugaccuuaacuu

SEQ ID NO: 45985 - DNA, 21 bp, homo sapiens
cagcagaagtgatgaaagtcc

SEQ ID NO: 45986 - RNA, 21 nt, RNAi
gcagaagugaugaaaguccuu

SEQ ID NO: 45987 - RNA, 21 nt, RNAi
uucgucuucacuacuuucagg

SEQ ID NO: 45988 - DNA, 21 bp, homo sapiens
caggtgattgttcggaaggaa

SEQ ID NO: 45989 - RNA, 21 nt, RNAi
ggugauuguucggaaggaauu

SEQ ID NO: 45990 - RNA, 21 nt, RNAi
uuccacuaacaagccuuccuu

SEQ ID NO: 45991 - DNA, 21 bp, homo sapiens
cagtgatctatcaagctagcc

SEQ ID NO: 45992 - RNA, 21 nt, RNAi
gugaucuaucaagcuagccuu

SEQ ID NO: 45993 - RNA, 21 nt, RNAi
uucacuagauaguucgaucgg

SEQ ID NO: 45994 - DNA, 21 bp, homo sapiens
catccaaaggatcagttactt

SEQ ID NO: 45995 - RNA, 21 nt, RNAi
uccaaaggaucaguuacuuuu

SEQ ID NO: 45996 - RNA, 21 nt, RNAi
uuagguuuccuagucaaugaa

SEQ ID NO: 45997 - DNA, 21 bp, homo sapiens
cacaccattagcaagtacttc

SEQ ID NO: 45998 - RNA, 21 nt, RNAi
caccauuagcaaguacuucuu

SEQ ID NO: 45999 - RNA, 21 nt, RNAi
uugugguaaucguucaugaag

SEQ ID NO: 46000 - DNA, 21 bp, homo sapiens
caaactctcttaacggtgatg

SEQ ID NO: 46001 - RNA, 21 nt, RNAi
aacucucuuaacggugauguu

SEQ ID NO: 46002 - RNA, 21 nt, RNAi
uuuugagagaauugccacuac

SEQ ID NO: 46003 - DNA, 21 bp, homo sapiens
cactactacatttactctgca

SEQ ID NO: 46004 - RNA, 21 nt, RNAi
cuacuacauuuacucugcauu

SEQ ID NO: 46005 - RNA, 21 nt, RNAi
uugaugauguaaaugagacgu

SEQ ID NO: 46006 - DNA, 21 bp, homo sapiens
caagtccaaggctattactcc

SEQ ID NO: 46007 - RNA, 21 nt, RNAi
aguccaaggcuauuacuccuu

SEQ ID NO: 46008 - RNA, 21 nt, RNAi
uuucagguuccgauaaugagg

SEQ ID NO: 46009 - DNA, 21 bp, homo sapiens
cagatgatgagaaacgcaaga

SEQ ID NO: 46010 - RNA, 21 nt, RNAi
gaugaugagaaacgcaagauu

SEQ ID NO: 46011 - RNA, 21 nt, RNAi
uucuacuacucuuugcguucu

SEQ ID NO: 46012 - DNA, 21 bp, homo sapiens
cataggaaggataaatctggc

SEQ ID NO: 46013 - RNA, 21 nt, RNAi
uaggaaggauaaaucuggcuu

SEQ ID NO: 46014 - RNA, 21 nt, RNAi
uuauccuuccuauuuagaccg

SEQ ID NO: 46015 - DNA, 21 bp, homo sapiens
cacactctgtgttaccaagaa

SEQ ID NO: 46016 - RNA, 21 nt, RNAi
cacucuguguuaccaagaauu

SEQ ID NO: 46017 - RNA, 21 nt, RNAi
uugugagacacaaugguucuu

SEQ ID NO: 46018 - DNA, 21 bp, homo sapiens
gactcatgctaagcgagctag

SEQ ID NO: 46019 - RNA, 21 nt, RNAi
cucaugcuaagcgagcuaguu

SEQ ID NO: 46020 - RNA, 21 nt, RNAi
uugaguacgauucgcucgauc

SEQ ID NO: 46021 - DNA, 21 bp, homo sapiens
gatggcgatgcctctttgaat

SEQ ID NO: 46022 - RNA, 21 nt, RNAi
uggcgaugccucuuugaauuu

SEQ ID NO: 46023 - RNA, 21 nt, RNAi
uuaccgcuacggagaaacuua

SEQ ID NO: 46024 - DNA, 21 bp, homo sapiens
gatgcctctttgaataaagcc

SEQ ID NO: 46025 - RNA, 21 nt, RNAi
ugccucuuugaauaaagccuu

SEQ ID NO: 46026 - RNA, 21 nt, RNAi
uuacggagaaacuuauuucgg

SEQ ID NO: 46027 - DNA, 21 bp, homo sapiens
gacaaatctacgacaccagga

SEQ ID NO: 46028 - RNA, 21 nt, RNAi
caaaucuacgacaccaggauu

SEQ ID NO: 46029 - RNA, 21 nt, RNAi
uuguuuagaugcugugguccu

SEQ ID NO: 46030 - DNA, 21 bp, homo sapiens
gagagcgttgtcaagaacata

SEQ ID NO: 46031 - RNA, 21 nt, RNAi
gagcguugucaagaacauauu

SEQ ID NO: 46032 - RNA, 21 nt, RNAi
uucucgcaacaguucuuguau

SEQ ID NO: 46033 - DNA, 21 bp, homo sapiens
gaactagcatgtcttcgtggc

SEQ ID NO: 46034 - RNA, 21 nt, RNAi
acuagcaugucuucguggcuu

SEQ ID NO: 46035 - RNA, 21 nt, RNAi
uuugaucguacagaagcaccg

SEQ ID NO: 46036 - DNA, 21 bp, homo sapiens
gaatgcgaaatgacgaaatct

SEQ ID NO: 46037 - RNA, 21 nt, RNAi
augcgaaaugacgaaaucuuu

SEQ ID NO: 46038 - RNA, 21 nt, RNAi
uuuacgcuuuacugcuuuaga

SEQ ID NO: 46039 - DNA, 21 bp, homo sapiens
gaagtgatacgtgaaattgag

SEQ ID NO: 46040 - RNA, 21 nt, RNAi
agugauacgugaaauugaguu

SEQ ID NO: 46041 - RNA, 21 nt, RNAi
uuucacuaugcacuuuaacuc

SEQ ID NO: 46042 - DNA, 21 bp, homo sapiens
gaaggtgaactagatatggag

SEQ ID NO: 46043 - RNA, 21 nt, RNAi
aggugaacuagauauggaguu

SEQ ID NO: 46044 - RNA, 21 nt, RNAi
uuuccacuugaucuauaccuc

SEQ ID NO: 46045 - DNA, 21 bp, homo sapiens
gaactagatatggagaagagc

SEQ ID NO: 46046 - RNA, 21 nt, RNAi
acuagauauggagaagagcuu

SEQ ID NO: 46047 - RNA, 21 nt, RNAi
uuugaucuauaccucuucucg

SEQ ID NO: 46048 - DNA, 21 bp, homo sapiens
gagatggatcaagcattagca

SEQ ID NO: 46049 - RNA, 21 nt, RNAi
gauggaucaagcauuagcauu

SEQ ID NO: 46050 - RNA, 21 nt, RNAi
uucuaccuaguucguaaucgu

SEQ ID NO: 46051 - DNA, 21 bp, homo sapiens
gatggatcaagcattagcaga

SEQ ID NO: 46052 - RNA, 21 nt, RNAi
uggaucaagcauuagcagauu

SEQ ID NO: 46053 - RNA, 21 nt, RNAi
uuaccuaguucguaaucgucu

SEQ ID NO: 46054 - DNA, 21 bp, homo sapiens
gatcaagcattagcagaaagc

SEQ ID NO: 46055 - RNA, 21 nt, RNAi
ucaagcauuagcagaaagcuu

SEQ ID NO: 46056 - RNA, 21 nt, RNAi
uuaguucguaaucgucuuucg

SEQ ID NO: 46057 - DNA, 21 bp, homo sapiens
gaagatgcactgaatatctcc

SEQ ID NO: 46058 - RNA, 21 nt, RNAi
agaugcacugaauaucuccuu

SEQ ID NO: 46059 - RNA, 21 nt, RNAi
uuucuacgugacuuauagagg

SEQ ID NO: 46060 - DNA, 21 bp, homo sapiens
gatgcactgaatatctcctca

SEQ ID NO: 46061 - RNA, 21 nt, RNAi
ugcacugaauaucuccucauu

SEQ ID NO: 46062 - RNA, 21 nt, RNAi
uuacgugacuuauagaggagu

SEQ ID NO: 46063 - DNA, 21 bp, homo sapiens
gagagtttagtgtccacacct

SEQ ID NO: 46064 - RNA, 21 nt, RNAi
gaguuuaguguccacaccuuu

SEQ ID NO: 46065 - RNA, 21 nt, RNAi
uucucaaaucacaggugugga

SEQ ID NO: 46066 - DNA, 21 bp, homo sapiens
gagtttagtgtccacacctag

SEQ ID NO: 46067 - RNA, 21 nt, RNAi
guuuaguguccacaccuaguu

SEQ ID NO: 46068 - RNA, 21 nt, RNAi
uucaaaucacagguguggauc

SEQ ID NO: 46069 - DNA, 21 bp, homo sapiens
gaatctggtgatagccttggt

SEQ ID NO: 46070 - RNA, 21 nt, RNAi
aucuggugauagccuugguuu

SEQ ID NO: 46071 - RNA, 21 nt, RNAi
uuuagaccacuaucggaacca

SEQ ID NO: 46072 - DNA, 21 bp, homo sapiens
gatagccttggttctgaagat

SEQ ID NO: 46073 - RNA, 21 nt, RNAi
uagccuugguucugaagauuu

SEQ ID NO: 46074 - RNA, 21 nt, RNAi
uuaucggaaccaagacuucua

SEQ ID NO: 46075 - DNA, 21 bp, homo sapiens
gatcgtgatcttctttacagc

SEQ ID NO: 46076 - RNA, 21 nt, RNAi
ucgugaucuucuuuacagcuu

SEQ ID NO: 46077 - RNA, 21 nt, RNAi
uuagcacuagaagaaaugucg

SEQ ID NO: 46078 - DNA, 21 bp, homo sapiens
gattgttcggaaggaagatgt

SEQ ID NO: 46079 - RNA, 21 nt, RNAi
uuguucggaaggaagauguuu

SEQ ID NO: 46080 - RNA, 21 nt, RNAi
uuaacaagccuuccuucuaca

SEQ ID NO: 46081 - DNA, 21 bp, homo sapiens
gacagtgatctatcaagctag

SEQ ID NO: 46082 - RNA, 21 nt, RNAi
cagugaucuaucaagcuaguu

SEQ ID NO: 46083 - RNA, 21 nt, RNAi
uugucacuagauaguucgauc

SEQ ID NO: 46084 - DNA, 21 bp, homo sapiens
gatctatcaagctagccaggc

SEQ ID NO: 46085 - RNA, 21 nt, RNAi
ucuaucaagcuagccaggcuu

SEQ ID NO: 46086 - RNA, 21 nt, RNAi
uuagauaguucgaucgguccg

SEQ ID NO: 46087 - DNA, 21 bp, homo sapiens
gacttcttctaattgcaactg

SEQ ID NO: 46088 - RNA, 21 nt, RNAi
cuucuucuaauugcaacuguu

SEQ ID NO: 46089 - RNA, 21 nt, RNAi
uugaagaagauuaacguugac

SEQ ID NO: 46090 - DNA, 21 bp, homo sapiens
gaatttatgccatccaaagga

SEQ ID NO: 46091 - RNA, 21 nt, RNAi
auuuaugccauccaaaggauu

SEQ ID NO: 46092 - RNA, 21 nt, RNAi
uuuaaauacgguagguuuccu

SEQ ID NO: 46093 - DNA, 21 bp, homo sapiens
gaggtcttagtgctgtgcgaa

SEQ ID NO: 46094 - RNA, 21 nt, RNAi
ggucuuagugcugugcgaauu

SEQ ID NO: 46095 - RNA, 21 nt, RNAi
uuccagaaucacgacacgcuu

SEQ ID NO: 46096 - DNA, 21 bp, homo sapiens
gatgatgagaaacgcaagaat

SEQ ID NO: 46097 - RNA, 21 nt, RNAi
ugaugagaaacgcaagaauuu

SEQ ID NO: 46098 - RNA, 21 nt, RNAi
uuacuacucuuugcguucuua

SEQ ID NO: 46099 - DNA, 21 bp, homo sapiens
gaagatgaccgagagactctt

SEQ ID NO: 46100 - RNA, 21 nt, RNAi
agaugaccgagagacucuuuu

SEQ ID NO: 46101 - RNA, 21 nt, RNAi
uuucuacuggcucucugagaa

SEQ ID NO: 46102 - DNA, 21 bp, homo sapiens
gatgaccgagagactcttgtc

SEQ ID NO: 46103 - RNA, 21 nt, RNAi
ugaccgagagacucuugucuu

SEQ ID NO: 46104 - RNA, 21 nt, RNAi
uuacuggcucucugagaacag

SEQ ID NO: 46105 - DNA, 21 bp, homo sapiens
gacacactctgtgttaccaag

SEQ ID NO: 46106 - RNA, 21 nt, RNAi
cacacucuguguuaccaaguu

SEQ ID NO: 46107 - RNA, 21 nt, RNAi
uugugugagacacaaugguuc

SEQ ID NO: 46108 - DNA, 21 bp, homo sapiens
tatgactcatgctaagcgagc

SEQ ID NO: 46109 - RNA, 21 nt, RNAi
ugacucaugcuaagcgagcuu

SEQ ID NO: 46110 - RNA, 21 nt, RNAi
uuacugaguacgauucgcucg

SEQ ID NO: 46111 - DNA, 21 bp, homo sapiens
taaacaaccagttgagtcgac

SEQ ID NO: 46112 - RNA, 21 nt, RNAi
aacaaccaguugagucgacuu

SEQ ID NO: 46113 - RNA, 21 nt, RNAi
uuuuguuggucaacucagcug

SEQ ID NO: 46114 - DNA, 21 bp, homo sapiens
taggatcaatagcagcagtgt

SEQ ID NO: 46115 - RNA, 21 nt, RNAi
ggaucaauagcagcaguguuu

SEQ ID NO: 46116 - RNA, 21 nt, RNAi
uuccuaguuaucgucgucaca

SEQ ID NO: 46117 - DNA, 21 bp, homo sapiens
tagcagcagtgttaagcagga

SEQ ID NO: 46118 - RNA, 21 nt, RNAi
gcagcaguguuaagcaggauu

SEQ ID NO: 46119 - RNA, 21 nt, RNAi
uucgucgucacaauucguccu

SEQ ID NO: 46120 - DNA, 21 bp, homo sapiens
tatcgaaaccaattgtgaagt

SEQ ID NO: 46121 - RNA, 21 nt, RNAi
ucgaaaccaauugugaaguuu

SEQ ID NO: 46122 - RNA, 21 nt, RNAi
uuagcuuugguuaacacuuca

SEQ ID NO: 46123 - DNA, 21 bp, homo sapiens
tacttgcaccattggcacaaa

SEQ ID NO: 46124 - RNA, 21 nt, RNAi
cuugcaccauuggcacaaauu

SEQ ID NO: 46125 - RNA, 21 nt, RNAi
uugaacgugguaaccguguuu

SEQ ID NO: 46126 - DNA, 21 bp, homo sapiens
tagccttggttctgaagatcg

SEQ ID NO: 46127 - RNA, 21 nt, RNAi
gccuugguucugaagaucguu

SEQ ID NO: 46128 - RNA, 21 nt, RNAi
uucggaaccaagacuucuagc

SEQ ID NO: 46129 - DNA, 21 bp, homo sapiens
tacagcattgatgcatataga

SEQ ID NO: 46130 - RNA, 21 nt, RNAi
cagcauugaugcauauagauu

SEQ ID NO: 46131 - RNA, 21 nt, RNAi
uugucguaacuacguauaucu

SEQ ID NO: 46132 - DNA, 21 bp, homo sapiens
taatgcctttccttgtcaagt

SEQ ID NO: 46133 - RNA, 21 nt, RNAi
augccuuuccuugucaaguuu

SEQ ID NO: 46134 - RNA, 21 nt, RNAi
uuuacggaaaggaacaguuca

SEQ ID NO: 46135 - DNA, 21 bp, homo sapiens
tatgccatccaaaggatcagt

SEQ ID NO: 46136 - RNA, 21 nt, RNAi
ugccauccaaaggaucaguuu

SEQ ID NO: 46137 - RNA, 21 nt, RNAi
uuacgguagguuuccuaguca

SEQ ID NO: 46138 - DNA, 21 bp, homo sapiens
tatggtagccacaccattagc

SEQ ID NO: 46139 - RNA, 21 nt, RNAi
ugguagccacaccauuagcuu

SEQ ID NO: 46140 - RNA, 21 nt, RNAi
uuaccaucggugugguaaucg

SEQ ID NO: 46141 - DNA, 21 bp, homo sapiens
tagccacaccattagcaagta

SEQ ID NO: 46142 - RNA, 21 nt, RNAi
gccacaccauuagcaaguauu

SEQ ID NO: 46143 - RNA, 21 nt, RNAi
uucggugugguaaucguucau

SEQ ID NO: 46144 - DNA, 21 bp, homo sapiens
tagcaagtacttcaaactctc

SEQ ID NO: 46145 - RNA, 21 nt, RNAi
gcaaguacuucaaacucucuu

SEQ ID NO: 46146 - RNA, 21 nt, RNAi
uucguucaugaaguuugagag

SEQ ID NO: 46147 - DNA, 21 bp, homo sapiens
tactctgcaagatgtatccaa

SEQ ID NO: 46148 - RNA, 21 nt, RNAi
cucugcaagauguauccaauu

SEQ ID NO: 46149 - RNA, 21 nt, RNAi
uugagacguucuacauagguu

SEQ ID NO: 46150 - DNA, 21 bp, homo sapiens
tatcattgtcttcagtaggaa

SEQ ID NO: 46151 - RNA, 21 nt, RNAi
ucauugucuucaguaggaauu

SEQ ID NO: 46152 - RNA, 21 nt, RNAi
uuaguaacagaagucauccuu

SEQ ID NO: 46153 - DNA, 21 bp, homo sapiens
tatcttattggacttatccag

SEQ ID NO: 46154 - RNA, 21 nt, RNAi
ucuuauuggacuuauccaguu

SEQ ID NO: 46155 - RNA, 21 nt, RNAi
uuagaauaaccugaauagguc

SEQ ID NO: 46156 - DNA, 21 bp, homo sapiens
taggaaggataaatctggcta

SEQ ID NO: 46157 - RNA, 21 nt, RNAi
ggaaggauaaaucuggcuauu

SEQ ID NO: 46158 - RNA, 21 nt, RNAi
uuccuuccuauuuagaccgau

SEQ ID NO: 46159 - DNA, 21 bp, homo sapiens
taaatctggctaattgtacca

SEQ ID NO: 46160 - RNA, 21 nt, RNAi
aaucuggcuaauuguaccauu

SEQ ID NO: 46161 - RNA, 21 nt, RNAi
uuuuagaccgauuaacauggu

SEQ ID NO: 46162 - DNA, 21 bp, homo sapiens
taattgtaccagtcgtcagat

SEQ ID NO: 46163 - RNA, 21 nt, RNAi
auuguaccagucgucagauuu

SEQ ID NO: 46164 - RNA, 21 nt, RNAi
uuuaacauggucagcagucua

SEQ ID NO: 46165 - DNA, 21 bp, homo sapiens
taccagtcgtcagatagaacc

SEQ ID NO: 46166 - RNA, 21 nt, RNAi
ccagucgucagauagaaccuu

SEQ ID NO: 46167 - RNA, 21 nt, RNAi
uuggucagcagucuaucuugg

SEQ ID NO: 46168 - DNA, 21 bp, homo sapiens
aagatccaggagctgttccac

SEQ ID NO: 46169 - RNA, 21 nt, RNAi
gauccaggagcuguuccacuu

SEQ ID NO: 46170 - RNA, 21 nt, RNAi
uucuagguccucgacaaggug

SEQ ID NO: 46171 - DNA, 21 bp, homo sapiens
aaacagatggaggacggccat

SEQ ID NO: 46172 - RNA, 21 nt, RNAi
acagauggaggacggccauuu

SEQ ID NO: 46173 - RNA, 21 nt, RNAi
uuugucuaccuccugccggua

SEQ ID NO: 46174 - DNA, 21 bp, homo sapiens
aacagatggaggacggccata

SEQ ID NO: 46175 - RNA, 21 nt, RNAi
cagauggaggacggccauauu

SEQ ID NO: 46176 - RNA, 21 nt, RNAi
uugucuaccuccugccgguau

SEQ ID NO: 46177 - DNA, 21 bp, homo sapiens
aatgacaccatccagctcctg

SEQ ID NO: 46178 - RNA, 21 nt, RNAi
ugacaccauccagcuccuguu

SEQ ID NO: 46179 - RNA, 21 nt, RNAi
uuacugugguaggucgaggac

SEQ ID NO: 46180 - DNA, 21 bp, homo sapiens
aaggtcaatgagtacgtcgat

SEQ ID NO: 46181 - RNA, 21 nt, RNAi
ggucaaugaguacgucgauuu

SEQ ID NO: 46182 - RNA, 21 nt, RNAi
uuccaguuacucaugcagcua

SEQ ID NO: 46183 - DNA, 21 bp, homo sapiens
aatgagtacgtcgatgctcgg

SEQ ID NO: 46184 - RNA, 21 nt, RNAi
ugaguacgucgaugcucgguu

SEQ ID NO: 46185 - RNA, 21 nt, RNAi
uuacucaugcagcuacgagcc

SEQ ID NO: 46186 - DNA, 21 bp, homo sapiens
aacggcgtggtccagatgaac

SEQ ID NO: 46187 - RNA, 21 nt, RNAi
cggcgugguccagaugaacuu

SEQ ID NO: 46188 - RNA, 21 nt, RNAi
uugccgcaccaggucuacuug

SEQ ID NO: 46189 - DNA, 21 bp, homo sapiens
aagtggcaggacctggaggtg

SEQ ID NO: 46190 - RNA, 21 nt, RNAi
guggcaggaccuggagguguu

SEQ ID NO: 46191 - RNA, 21 nt, RNAi
uucaccguccuggaccuccac

SEQ ID NO: 46192 - DNA, 21 bp, homo sapiens
aactctacgccaacgtggtgc

SEQ ID NO: 46193 - RNA, 21 nt, RNAi
cucuacgccaacguggugcuu

SEQ ID NO: 46194 - RNA, 21 nt, RNAi
uugagaugcgguugcaccacg

SEQ ID NO: 46195 - DNA, 21 bp, homo sapiens
aacgactgtcggatcatcttc

SEQ ID NO: 46196 - RNA, 21 nt, RNAi
cgacugucggaucaucuucuu

SEQ ID NO: 46197 - RNA, 21 nt, RNAi
uugcugacagccuaguagaag

SEQ ID NO: 46198 - DNA, 21 bp, homo sapiens
aagtcttcaagattgagcggc

SEQ ID NO: 46199 - RNA, 21 nt, RNAi
gucuucaagauugagcggcuu

SEQ ID NO: 46200 - RNA, 21 nt, RNAi
uucagaaguucuaacucgccg

SEQ ID NO: 46201 - DNA, 21 bp, homo sapiens
aagcactgcaaggacgacgtg

SEQ ID NO: 46202 - RNA, 21 nt, RNAi
gcacugcaaggacgacguguu

SEQ ID NO: 46203 - RNA, 21 nt, RNAi
uucgugacguuccugcugcac

SEQ ID NO: 46204 - DNA, 21 bp, homo sapiens
aaggacgacgtgaacagactc

SEQ ID NO: 46205 - RNA, 21 nt, RNAi
ggacgacgugaacagacucuu

SEQ ID NO: 46206 - RNA, 21 nt, RNAi
uuccugcugcacuugucugag

SEQ ID NO: 46207 - DNA, 21 bp, homo sapiens
aagcagctcatgtgcgatgag

SEQ ID NO: 46208 - RNA, 21 nt, RNAi
gcagcucaugugcgaugaguu

SEQ ID NO: 46209 - RNA, 21 nt, RNAi
uucgucgaguacacgcuacuc

SEQ ID NO: 46210 - DNA, 21 bp, homo sapiens
aatgatgccagcgaggtggta

SEQ ID NO: 46211 - RNA, 21 nt, RNAi
ugaugccagcgaggugguauu

SEQ ID NO: 46212 - RNA, 21 nt, RNAi
uuacuacggucgcuccaccau

SEQ ID NO: 46213 - DNA, 21 bp, homo sapiens
aagaagaatgcgaagatggcc

SEQ ID NO: 46214 - RNA, 21 nt, RNAi
gaagaaugcgaagauggccuu

SEQ ID NO: 46215 - RNA, 21 nt, RNAi
uucuucuuacgcuucuaccgg

SEQ ID NO: 46216 - DNA, 21 bp, homo sapiens
aagaatgcgaagatggcctcg

SEQ ID NO: 46217 - RNA, 21 nt, RNAi
gaaugcgaagauggccucguu

SEQ ID NO: 46218 - RNA, 21 nt, RNAi
uucuuacgcuucuaccggagc

SEQ ID NO: 46219 - DNA, 21 bp, homo sapiens
aatgcgaagatggcctcggcc

SEQ ID NO: 46220 - RNA, 21 nt, RNAi
ugcgaagauggccucggccuu

SEQ ID NO: 46221 - RNA, 21 nt, RNAi
uuacgcuucuaccggagccgg

SEQ ID NO: 46222 - DNA, 21 bp, homo sapiens
aagatggcctcggccacatcg

SEQ ID NO: 46223 - RNA, 21 nt, RNAi
gauggccucggccacaucguu

SEQ ID NO: 46224 - RNA, 21 nt, RNAi
uucuaccggagccgguguagc

SEQ ID NO: 46225 - DNA, 21 bp, homo sapiens
aacaagaggaccgcggaacag

SEQ ID NO: 46226 - RNA, 21 nt, RNAi
caagaggaccgcggaacaguu

SEQ ID NO: 46227 - RNA, 21 nt, RNAi
uuguucuccuggcgccuuguc

SEQ ID NO: 46228 - DNA, 21 bp, homo sapiens
aagaggaccgcggaacagtct

SEQ ID NO: 46229 - RNA, 21 nt, RNAi
gaggaccgcggaacagucuuu

SEQ ID NO: 46230 - RNA, 21 nt, RNAi
uucuccuggcgccuugucaga

SEQ ID NO: 46231 - DNA, 21 bp, homo sapiens
aacagtcttgtgatcagaaac

SEQ ID NO: 46232 - RNA, 21 nt, RNAi
cagucuugugaucagaaacuu

SEQ ID NO: 46233 - RNA, 21 nt, RNAi
uugucagaacacuagucuuug

SEQ ID NO: 46234 - DNA, 21 bp, homo sapiens
aaactcaccaacaccaacagg

SEQ ID NO: 46235 - RNA, 21 nt, RNAi
acucaccaacaccaacagguu

SEQ ID NO: 46236 - RNA, 21 nt, RNAi
uuugagugguugugguugucc

SEQ ID NO: 46237 - DNA, 21 bp, homo sapiens
aaccgctacgatggcatctac

SEQ ID NO: 46238 - RNA, 21 nt, RNAi
ccgcuacgauggcaucuacuu

SEQ ID NO: 46239 - RNA, 21 nt, RNAi
uuggcgaugcuaccguagaug

SEQ ID NO: 46240 - DNA, 21 bp, homo sapiens
aaggaccggatcaagaagctg

SEQ ID NO: 46241 - RNA, 21 nt, RNAi
ggaccggaucaagaagcuguu

SEQ ID NO: 46242 - RNA, 21 nt, RNAi
uuccuggccuaguucuucgac

SEQ ID NO: 46243 - DNA, 21 bp, homo sapiens
aaccgagagcgagagaaggag

SEQ ID NO: 46244 - RNA, 21 nt, RNAi
ccgagagcgagagaaggaguu

SEQ ID NO: 46245 - RNA, 21 nt, RNAi
uuggcucucgcucucuuccuc

SEQ ID NO: 46246 - DNA, 21 bp, homo sapiens
aagtggaagcggaagtcggca

SEQ ID NO: 46247 - RNA, 21 nt, RNAi
guggaagcggaagucggcauu

SEQ ID NO: 46248 - RNA, 21 nt, RNAi
uucaccuucgccuucagccgu

SEQ ID NO: 46249 - DNA, 21 bp, homo sapiens
aagcggaagtcggcaggaggt

SEQ ID NO: 46250 - RNA, 21 nt, RNAi
gcggaagucggcaggagguuu

SEQ ID NO: 46251 - RNA, 21 nt, RNAi
uucgccuucagccguccucca

SEQ ID NO: 46252 - DNA, 21 bp, homo sapiens
aagagcaacgccaagctgtgg

SEQ ID NO: 46253 - RNA, 21 nt, RNAi
gagcaacgccaagcugugguu

SEQ ID NO: 46254 - RNA, 21 nt, RNAi
uucucguugcgguucgacacc

SEQ ID NO: 46255 - DNA, 21 bp, homo sapiens
aacgccaagctgtggaatgag

SEQ ID NO: 46256 - RNA, 21 nt, RNAi
cgccaagcuguggaaugaguu

SEQ ID NO: 46257 - RNA, 21 nt, RNAi
uugcgguucgacaccuuacuc

SEQ ID NO: 46258 - DNA, 21 bp, homo sapiens
aagctgtggaatgaggtcctg

SEQ ID NO: 46259 - RNA, 21 nt, RNAi
gcuguggaaugagguccuguu

SEQ ID NO: 46260 - RNA, 21 nt, RNAi
uucgacaccuuacuccaggac

SEQ ID NO: 46261 - DNA, 21 bp, homo sapiens
aatgaggtcctggcgtcactc

SEQ ID NO: 46262 - RNA, 21 nt, RNAi
ugagguccuggcgucacucuu

SEQ ID NO: 46263 - RNA, 21 nt, RNAi
uuacuccaggaccgcagugag

SEQ ID NO: 46264 - DNA, 21 bp, homo sapiens
aaagtggaggagacgttccag

SEQ ID NO: 46265 - RNA, 21 nt, RNAi
aguggaggagacguuccaguu

SEQ ID NO: 46266 - RNA, 21 nt, RNAi
uuucaccuccucugcaagguc

SEQ ID NO: 46267 - DNA, 21 bp, homo sapiens
aagtggaggagacgttccagt

SEQ ID NO: 46268 - RNA, 21 nt, RNAi
guggaggagacguuccaguuu

SEQ ID NO: 46269 - RNA, 21 nt, RNAi
uucaccuccucugcaagguca

SEQ ID NO: 46270 - DNA, 21 bp, homo sapiens
aacgtgtgcaaggactgcctg

SEQ ID NO: 46271 - RNA, 21 nt, RNAi
cgugugcaaggacugccuguu

SEQ ID NO: 46272 - RNA, 21 nt, RNAi
uugcacacguuccugacggac

SEQ ID NO: 46273 - DNA, 21 bp, homo sapiens
aaggactgcctggacagatcc

SEQ ID NO: 46274 - RNA, 21 nt, RNAi
ggacugccuggacagauccuu

SEQ ID NO: 46275 - RNA, 21 nt, RNAi
uuccugacggaccugucuagg

SEQ ID NO: 46276 - DNA, 21 bp, homo sapiens
aaccagcctctgcagaccgtc

SEQ ID NO: 46277 - RNA, 21 nt, RNAi
ccagccucugcagaccgucuu

SEQ ID NO: 46278 - RNA, 21 nt, RNAi
uuggucggagacgucuggcag

SEQ ID NO: 46279 - DNA, 21 bp, homo sapiens
caggctgaccaaggtggagga

SEQ ID NO: 46280 - RNA, 21 nt, RNAi
ggcugaccaagguggaggauu

SEQ ID NO: 46281 - RNA, 21 nt, RNAi
uuccgacugguuccaccuccu

SEQ ID NO: 46282 - DNA, 21 bp, homo sapiens
caggagctgttccacgtggag

SEQ ID NO: 46283 - RNA, 21 nt, RNAi
ggagcuguuccacguggaguu

SEQ ID NO: 46284 - RNA, 21 nt, RNAi
uuccucgacaaggugcaccuc

SEQ ID NO: 46285 - DNA, 21 bp, homo sapiens
caggcctgcagaggctgttct

SEQ ID NO: 46286 - RNA, 21 nt, RNAi
ggccugcagaggcuguucuuu

SEQ ID NO: 46287 - RNA, 21 nt, RNAi
uuccggacgucuccgacaaga

SEQ ID NO: 46288 - DNA, 21 bp, homo sapiens
caaacagatggaggacggcca

SEQ ID NO: 46289 - RNA, 21 nt, RNAi
aacagauggaggacggccauu

SEQ ID NO: 46290 - RNA, 21 nt, RNAi
uuuugucuaccuccugccggu

SEQ ID NO: 46291 - DNA, 21 bp, homo sapiens
cagatggaggacggccatacc

SEQ ID NO: 46292 - RNA, 21 nt, RNAi
gauggaggacggccauaccuu

SEQ ID NO: 46293 - RNA, 21 nt, RNAi
uucuaccuccugccgguaugg

SEQ ID NO: 46294 - DNA, 21 bp, homo sapiens
cagagtgagtcagacaagtcc

SEQ ID NO: 46295 - RNA, 21 nt, RNAi
gagugagucagacaaguccuu

SEQ ID NO: 46296 - RNA, 21 nt, RNAi
uucucacucagucuguucagg

SEQ ID NO: 46297 - DNA, 21 bp, homo sapiens
caggccagccgatgaggacat

SEQ ID NO: 46298 - RNA, 21 nt, RNAi
ggccagccgaugaggacauuu

SEQ ID NO: 46299 - RNA, 21 nt, RNAi
uuccggucggcuacuccugua

SEQ ID NO: 46300 - DNA, 21 bp, homo sapiens
caaggtcaatgagtacgtcga

SEQ ID NO: 46301 - RNA, 21 nt, RNAi
aggucaaugaguacgucgauu

SEQ ID NO: 46302 - RNA, 21 nt, RNAi
uuuccaguuacucaugcagcu

SEQ ID NO: 46303 - DNA, 21 bp, homo sapiens
caatgagtacgtcgatgctcg

SEQ ID NO: 46304 - RNA, 21 nt, RNAi
augaguacgucgaugcucguu

SEQ ID NO: 46305 - RNA, 21 nt, RNAi
uuuacucaugcagcuacgagc

SEQ ID NO: 46306 - DNA, 21 bp, homo sapiens
catttaccacgtgaaatacga

SEQ ID NO: 46307 - RNA, 21 nt, RNAi
uuuaccacgugaaauacgauu

SEQ ID NO: 46308 - RNA, 21 nt, RNAi
uuaaauggugcacuuuaugcu

SEQ ID NO: 46309 - DNA, 21 bp, homo sapiens
cacgtgaaatacgacgactac

SEQ ID NO: 46310 - RNA, 21 nt, RNAi
cgugaaauacgacgacuacuu

SEQ ID NO: 46311 - RNA, 21 nt, RNAi
uugcacuuuaugcugcugaug

SEQ ID NO: 46312 - DNA, 21 bp, homo sapiens
caccatcatcaagtggcagga

SEQ ID NO: 46313 - RNA, 21 nt, RNAi
ccaucaucaaguggcaggauu

SEQ ID NO: 46314 - RNA, 21 nt, RNAi
uugguaguaguucaccguccu

SEQ ID NO: 46315 - DNA, 21 bp, homo sapiens
catcatcaagtggcaggacct

SEQ ID NO: 46316 - RNA, 21 nt, RNAi
ucaucaaguggcaggaccuuu

SEQ ID NO: 46317 - RNA, 21 nt, RNAi
uuaguaguucaccguccugga

SEQ ID NO: 46318 - DNA, 21 bp, homo sapiens
catcaagtggcaggacctgga

SEQ ID NO: 46319 - RNA, 21 nt, RNAi
ucaaguggcaggaccuggauu

SEQ ID NO: 46320 - RNA, 21 nt, RNAi
uuaguucaccguccuggaccu

SEQ ID NO: 46321 - DNA, 21 bp, homo sapiens
caagtggcaggacctggaggt

SEQ ID NO: 46322 - RNA, 21 nt, RNAi
aguggcaggaccuggagguuu

SEQ ID NO: 46323 - RNA, 21 nt, RNAi
uuucaccguccuggaccucca

SEQ ID NO: 46324 - DNA, 21 bp, homo sapiens
caggtggtcatgctcaactac

SEQ ID NO: 46325 - RNA, 21 nt, RNAi
gguggucaugcucaacuacuu

SEQ ID NO: 46326 - RNA, 21 nt, RNAi
uuccaccaguacgaguugaug

SEQ ID NO: 46327 - DNA, 21 bp, homo sapiens
catcttcgtggacgaagtctt

SEQ ID NO: 46328 - RNA, 21 nt, RNAi
ucuucguggacgaagucuuuu

SEQ ID NO: 46329 - RNA, 21 nt, RNAi
uuagaagcaccugcuucagaa

SEQ ID NO: 46330 - DNA, 21 bp, homo sapiens
caagcactgcaaggacgacgt

SEQ ID NO: 46331 - RNA, 21 nt, RNAi
agcacugcaaggacgacguuu

SEQ ID NO: 46332 - RNA, 21 nt, RNAi
uuucgugacguuccugcugca

SEQ ID NO: 46333 - DNA, 21 bp, homo sapiens
cactgcaaggacgacgtgaac

SEQ ID NO: 46334 - RNA, 21 nt, RNAi
cugcaaggacgacgugaacuu

SEQ ID NO: 46335 - RNA, 21 nt, RNAi
uugacguuccugcugcacuug

SEQ ID NO: 46336 - DNA, 21 bp, homo sapiens
caaggacgacgtgaacagact

SEQ ID NO: 46337 - RNA, 21 nt, RNAi
aggacgacgugaacagacuuu

SEQ ID NO: 46338 - RNA, 21 nt, RNAi
uuuccugcugcacuugucuga

SEQ ID NO: 46339 - DNA, 21 bp, homo sapiens
caagcagctcatgtgcgatga

SEQ ID NO: 46340 - RNA, 21 nt, RNAi
agcagcucaugugcgaugauu

SEQ ID NO: 46341 - RNA, 21 nt, RNAi
uuucgucgaguacacgcuacu

SEQ ID NO: 46342 - DNA, 21 bp, homo sapiens
cagctcatgtgcgatgagtgc

SEQ ID NO: 46343 - RNA, 21 nt, RNAi
gcucaugugcgaugagugcuu

SEQ ID NO: 46344 - RNA, 21 nt, RNAi
uucgaguacacgcuacucacg

SEQ ID NO: 46345 - DNA, 21 bp, homo sapiens
catgtgcgatgagtgcgacat

SEQ ID NO: 46346 - RNA, 21 nt, RNAi
ugugcgaugagugcgacauuu

SEQ ID NO: 46347 - RNA, 21 nt, RNAi
uuacacgcuacucacgcugua

SEQ ID NO: 46348 - DNA, 21 bp, homo sapiens
catggccttccacatctactg

SEQ ID NO: 46349 - RNA, 21 nt, RNAi
uggccuuccacaucuacuguu

SEQ ID NO: 46350 - RNA, 21 nt, RNAi
uuaccggaagguguagaugac

SEQ ID NO: 46351 - DNA, 21 bp, homo sapiens
cagcgaggacgagtggtactg

SEQ ID NO: 46352 - RNA, 21 nt, RNAi
gcgaggacgagugguacuguu

SEQ ID NO: 46353 - RNA, 21 nt, RNAi
uucgcuccugcucaccaugac

SEQ ID NO: 46354 - DNA, 21 bp, homo sapiens
caagaagaatgcgaagatggc

SEQ ID NO: 46355 - RNA, 21 nt, RNAi
agaagaaugcgaagauggcuu

SEQ ID NO: 46356 - RNA, 21 nt, RNAi
uuucuucuuacgcuucuaccg

SEQ ID NO: 46357 - DNA, 21 bp, homo sapiens
caccaaggaatgtaccatcgt

SEQ ID NO: 46358 - RNA, 21 nt, RNAi
ccaaggaauguaccaucguuu

SEQ ID NO: 46359 - RNA, 21 nt, RNAi
uugguuccuuacaugguagca

SEQ ID NO: 46360 - DNA, 21 bp, homo sapiens
caccatgtggcggttccgagt

SEQ ID NO: 46361 - RNA, 21 nt, RNAi
ccauguggcgguuccgaguuu

SEQ ID NO: 46362 - RNA, 21 nt, RNAi
uugguacaccgccaaggcuca

SEQ ID NO: 46363 - DNA, 21 bp, homo sapiens
catgtggcggttccgagtcca

SEQ ID NO: 46364 - RNA, 21 nt, RNAi
uguggcgguuccgaguccauu

SEQ ID NO: 46365 - RNA, 21 nt, RNAi
uuacaccgccaaggcucaggu

SEQ ID NO: 46366 - DNA, 21 bp, homo sapiens
catccatggccggagcaacga

SEQ ID NO: 46367 - RNA, 21 nt, RNAi
uccauggccggagcaacgauu

SEQ ID NO: 46368 - RNA, 21 nt, RNAi
uuagguaccggccucguugcu

SEQ ID NO: 46369 - DNA, 21 bp, homo sapiens
caacaagaggaccgcggaaca

SEQ ID NO: 46370 - RNA, 21 nt, RNAi
acaagaggaccgcggaacauu

SEQ ID NO: 46371 - RNA, 21 nt, RNAi
uuuguucuccuggcgccuugu

SEQ ID NO: 46372 - DNA, 21 bp, homo sapiens
caagaggaccgcggaacagtc

SEQ ID NO: 46373 - RNA, 21 nt, RNAi
agaggaccgcggaacagucuu

SEQ ID NO: 46374 - RNA, 21 nt, RNAi
uuucuccuggcgccuugucag

SEQ ID NO: 46375 - DNA, 21 bp, homo sapiens
cagtcttgtgatcagaaactc

SEQ ID NO: 46376 - RNA, 21 nt, RNAi
gucuugugaucagaaacucuu

SEQ ID NO: 46377 - RNA, 21 nt, RNAi
uucagaacacuagucuuugag

SEQ ID NO: 46378 - DNA, 21 bp, homo sapiens
cagaaactcaccaacaccaac

SEQ ID NO: 46379 - RNA, 21 nt, RNAi
gaaacucaccaacaccaacuu

SEQ ID NO: 46380 - RNA, 21 nt, RNAi
uucuuugagugguugugguug

SEQ ID NO: 46381 - DNA, 21 bp, homo sapiens
caaccgctacgatggcatcta

SEQ ID NO: 46382 - RNA, 21 nt, RNAi
accgcuacgauggcaucuauu

SEQ ID NO: 46383 - RNA, 21 nt, RNAi
uuuggcgaugcuaccguagau

SEQ ID NO: 46384 - DNA, 21 bp, homo sapiens
catctacaaggttgtgaaata

SEQ ID NO: 46385 - RNA, 21 nt, RNAi
ucuacaagguugugaaauauu

SEQ ID NO: 46386 - RNA, 21 nt, RNAi
uuagauguuccaacacuuuau

SEQ ID NO: 46387 - DNA, 21 bp, homo sapiens
caaggttgtgaaatactggcc

SEQ ID NO: 46388 - RNA, 21 nt, RNAi
agguugugaaauacuggccuu

SEQ ID NO: 46389 - RNA, 21 nt, RNAi
uuuccaacacuuuaugaccgg

SEQ ID NO: 46390 - DNA, 21 bp, homo sapiens
catgcagtatccagaaggcta

SEQ ID NO: 46391 - RNA, 21 nt, RNAi
ugcaguauccagaaggcuauu

SEQ ID NO: 46392 - RNA, 21 nt, RNAi
uuacgucauaggucuuccgau

SEQ ID NO: 46393 - DNA, 21 bp, homo sapiens
cagtatccagaaggctacctg

SEQ ID NO: 46394 - RNA, 21 nt, RNAi
guauccagaaggcuaccuguu

SEQ ID NO: 46395 - RNA, 21 nt, RNAi
uucauaggucuuccgauggac

SEQ ID NO: 46396 - DNA, 21 bp, homo sapiens
caaccgagagcgagagaagga

SEQ ID NO: 46397 - RNA, 21 nt, RNAi
accgagagcgagagaaggauu

SEQ ID NO: 46398 - RNA, 21 nt, RNAi
uuuggcucucgcucucuuccu

SEQ ID NO: 46399 - DNA, 21 bp, homo sapiens
caagtggaagcggaagtcggc

SEQ ID NO: 46400 - RNA, 21 nt, RNAi
aguggaagcggaagucggcuu

SEQ ID NO: 46401 - RNA, 21 nt, RNAi
uuucaccuucgccuucagccg

SEQ ID NO: 46402 - DNA, 21 bp, homo sapiens
cagcagagcagcctcatcaga

SEQ ID NO: 46403 - RNA, 21 nt, RNAi
gcagagcagccucaucagauu

SEQ ID NO: 46404 - RNA, 21 nt, RNAi
uucgucucgucggaguagucu

SEQ ID NO: 46405 - DNA, 21 bp, homo sapiens
cagagcagcctcatcagagag

SEQ ID NO: 46406 - RNA, 21 nt, RNAi
gagcagccucaucagagaguu

SEQ ID NO: 46407 - RNA, 21 nt, RNAi
uucucgucggaguagucucuc

SEQ ID NO: 46408 - DNA, 21 bp, homo sapiens
cagcctcatcagagaggacaa

SEQ ID NO: 46409 - RNA, 21 nt, RNAi
gccucaucagagaggacaauu

SEQ ID NO: 46410 - RNA, 21 nt, RNAi
uucggaguagucucuccuguu

SEQ ID NO: 46411 - DNA, 21 bp, homo sapiens
catcagagaggacaagagcaa

SEQ ID NO: 46412 - RNA, 21 nt, RNAi
ucagagaggacaagagcaauu

SEQ ID NO: 46413 - RNA, 21 nt, RNAi
uuagucucuccuguucucguu

SEQ ID NO: 46414 - DNA, 21 bp, homo sapiens
cagagaggacaagagcaacgc

SEQ ID NO: 46415 - RNA, 21 nt, RNAi
gagaggacaagagcaacgcuu

SEQ ID NO: 46416 - RNA, 21 nt, RNAi
uucucuccuguucucguugcg

SEQ ID NO: 46417 - DNA, 21 bp, homo sapiens
caagagcaacgccaagctgtg

SEQ ID NO: 46418 - RNA, 21 nt, RNAi
agagcaacgccaagcuguguu

SEQ ID NO: 46419 - RNA, 21 nt, RNAi
uuucucguugcgguucgacac

SEQ ID NO: 46420 - DNA, 21 bp, homo sapiens
caacgccaagctgtggaatga

SEQ ID NO: 46421 - RNA, 21 nt, RNAi
acgccaagcuguggaaugauu

SEQ ID NO: 46422 - RNA, 21 nt, RNAi
uuugcgguucgacaccuuacu

SEQ ID NO: 46423 - DNA, 21 bp, homo sapiens
caagctgtggaatgaggtcct

SEQ ID NO: 46424 - RNA, 21 nt, RNAi
agcuguggaaugagguccuuu

SEQ ID NO: 46425 - RNA, 21 nt, RNAi
uuucgacaccuuacuccagga

SEQ ID NO: 46426 - DNA, 21 bp, homo sapiens
cagttgttcctgagtaaagtg

SEQ ID NO: 46427 - RNA, 21 nt, RNAi
guuguuccugaguaaaguguu

SEQ ID NO: 46428 - RNA, 21 nt, RNAi
uucaacaaggacucauuucac

SEQ ID NO: 46429 - DNA, 21 bp, homo sapiens
cagtgtatctgctgtcaggag

SEQ ID NO: 46430 - RNA, 21 nt, RNAi
guguaucugcugucaggaguu

SEQ ID NO: 46431 - RNA, 21 nt, RNAi
uucacauagacgacaguccuc

SEQ ID NO: 46432 - DNA, 21 bp, homo sapiens
catcacgaccgtgtgccagca

SEQ ID NO: 46433 - RNA, 21 nt, RNAi
ucacgaccgugugccagcauu

SEQ ID NO: 46434 - RNA, 21 nt, RNAi
uuagugcuggcacacggucgu

SEQ ID NO: 46435 - DNA, 21 bp, homo sapiens
cacgaccgtgtgccagcacaa

SEQ ID NO: 46436 - RNA, 21 nt, RNAi
cgaccgugugccagcacaauu

SEQ ID NO: 46437 - RNA, 21 nt, RNAi
uugcuggcacacggucguguu

SEQ ID NO: 46438 - DNA, 21 bp, homo sapiens
cagcacaacgtgtgcaaggac

SEQ ID NO: 46439 - RNA, 21 nt, RNAi
gcacaacgugugcaaggacuu

SEQ ID NO: 46440 - RNA, 21 nt, RNAi
uucguguugcacacguuccug

SEQ ID NO: 46441 - DNA, 21 bp, homo sapiens
cacaacgtgtgcaaggactgc

SEQ ID NO: 46442 - RNA, 21 nt, RNAi
caacgugugcaaggacugcuu

SEQ ID NO: 46443 - RNA, 21 nt, RNAi
uuguugcacacguuccugacg

SEQ ID NO: 46444 - DNA, 21 bp, homo sapiens
caacgtgtgcaaggactgcct

SEQ ID NO: 46445 - RNA, 21 nt, RNAi
acgugugcaaggacugccuuu

SEQ ID NO: 46446 - RNA, 21 nt, RNAi
uuugcacacguuccugacgga

SEQ ID NO: 46447 - DNA, 21 bp, homo sapiens
caaggactgcctggacagatc

SEQ ID NO: 46448 - RNA, 21 nt, RNAi
aggacugccuggacagaucuu

SEQ ID NO: 46449 - RNA, 21 nt, RNAi
uuuccugacggaccugucuag

SEQ ID NO: 46450 - DNA, 21 bp, homo sapiens
cagctatgccatgcaggtgaa

SEQ ID NO: 46451 - RNA, 21 nt, RNAi
gcuaugccaugcaggugaauu

SEQ ID NO: 46452 - RNA, 21 nt, RNAi
uucgauacgguacguccacuu

SEQ ID NO: 46453 - DNA, 21 bp, homo sapiens
catgcaggtgaaccagcctct

SEQ ID NO: 46454 - RNA, 21 nt, RNAi
ugcaggugaaccagccucuuu

SEQ ID NO: 46455 - RNA, 21 nt, RNAi
uuacguccacuuggucggaga

SEQ ID NO: 46456 - DNA, 21 bp, homo sapiens
caggtgaaccagcctctgcag

SEQ ID NO: 46457 - RNA, 21 nt, RNAi
ggugaaccagccucugcaguu

SEQ ID NO: 46458 - RNA, 21 nt, RNAi
uuccacuuggucggagacguc

SEQ ID NO: 46459 - DNA, 21 bp, homo sapiens
cagaccgtcctcaaccagctc

SEQ ID NO: 46460 - RNA, 21 nt, RNAi
gaccguccucaaccagcucuu

SEQ ID NO: 46461 - RNA, 21 nt, RNAi
uucuggcaggaguuggucgag

SEQ ID NO: 46462 - DNA, 21 bp, homo sapiens
gatccaggttcggaccatgga

SEQ ID NO: 46463 - RNA, 21 nt, RNAi
uccagguucggaccauggauu

SEQ ID NO: 46464 - RNA, 21 nt, RNAi
uuagguccaagccugguaccu

SEQ ID NO: 46465 - DNA, 21 bp, homo sapiens
gaccaaggtggaggagctgag

SEQ ID NO: 46466 - RNA, 21 nt, RNAi
ccaagguggaggagcugaguu

SEQ ID NO: 46467 - RNA, 21 nt, RNAi
uugguuccaccuccucgacuc

SEQ ID NO: 46468 - DNA, 21 bp, homo sapiens
gaggagctgaggcggaagatc

SEQ ID NO: 46469 - RNA, 21 nt, RNAi
ggagcugaggcggaagaucuu

SEQ ID NO: 46470 - RNA, 21 nt, RNAi
uuccucgacuccgccuucuag

SEQ ID NO: 46471 - DNA, 21 bp, homo sapiens
gagctgaggcggaagatccag

SEQ ID NO: 46472 - RNA, 21 nt, RNAi
gcugaggcggaagauccaguu

SEQ ID NO: 46473 - RNA, 21 nt, RNAi
uucgacuccgccuucuagguc

SEQ ID NO: 46474 - DNA, 21 bp, homo sapiens
gaggcggaagatccaggagct

SEQ ID NO: 46475 - RNA, 21 nt, RNAi
ggcggaagauccaggagcuuu

SEQ ID NO: 46476 - RNA, 21 nt, RNAi
uuccgccuucuagguccucga

SEQ ID NO: 46477 - DNA, 21 bp, homo sapiens
gaagatccaggagctgttcca

SEQ ID NO: 46478 - RNA, 21 nt, RNAi
agauccaggagcuguuccauu

SEQ ID NO: 46479 - RNA, 21 nt, RNAi
uuucuagguccucgacaaggu

SEQ ID NO: 46480 - DNA, 21 bp, homo sapiens
gatccaggagctgttccacgt

SEQ ID NO: 46481 - RNA, 21 nt, RNAi
uccaggagcuguuccacguuu

SEQ ID NO: 46482 - RNA, 21 nt, RNAi
uuagguccucgacaaggugca

SEQ ID NO: 46483 - DNA, 21 bp, homo sapiens
gagctgttccacgtggagcca

SEQ ID NO: 46484 - RNA, 21 nt, RNAi
gcuguuccacguggagccauu

SEQ ID NO: 46485 - RNA, 21 nt, RNAi
uucgacaaggugcaccucggu

SEQ ID NO: 46486 - DNA, 21 bp, homo sapiens
gactacgaggtccgcctgaat

SEQ ID NO: 46487 - RNA, 21 nt, RNAi
cuacgagguccgccugaauuu

SEQ ID NO: 46488 - RNA, 21 nt, RNAi
uugaugcuccaggcggacuua

SEQ ID NO: 46489 - DNA, 21 bp, homo sapiens
gaggtccgcctgaatgacacc

SEQ ID NO: 46490 - RNA, 21 nt, RNAi
gguccgccugaaugacaccuu

SEQ ID NO: 46491 - RNA, 21 nt, RNAi
uuccaggcggacuuacugugg

SEQ ID NO: 46492 - DNA, 21 bp, homo sapiens
gaatgacaccatccagctcct

SEQ ID NO: 46493 - RNA, 21 nt, RNAi
augacaccauccagcuccuuu

SEQ ID NO: 46494 - RNA, 21 nt, RNAi
uuuacugugguaggucgagga

SEQ ID NO: 46495 - DNA, 21 bp, homo sapiens
gacaccatccagctcctggtc

SEQ ID NO: 46496 - RNA, 21 nt, RNAi
caccauccagcuccuggucuu

SEQ ID NO: 46497 - RNA, 21 nt, RNAi
uugugguaggucgaggaccag

SEQ ID NO: 46498 - DNA, 21 bp, homo sapiens
gagtgagtcagacaagtcctc

SEQ ID NO: 46499 - RNA, 21 nt, RNAi
gugagucagacaaguccucuu

SEQ ID NO: 46500 - RNA, 21 nt, RNAi
uucacucagucuguucaggag

SEQ ID NO: 46501 - DNA, 21 bp, homo sapiens
gagtcagacaagtcctccacc

SEQ ID NO: 46502 - RNA, 21 nt, RNAi
gucagacaaguccuccaccuu

SEQ ID NO: 46503 - RNA, 21 nt, RNAi
uucagucuguucaggaggugg

SEQ ID NO: 46504 - DNA, 21 bp, homo sapiens
gaggaggacgtcatttaccac

SEQ ID NO: 46505 - RNA, 21 nt, RNAi
ggaggacgucauuuaccacuu

SEQ ID NO: 46506 - RNA, 21 nt, RNAi
uuccuccugcaguaaauggug

SEQ ID NO: 46507 - DNA, 21 bp, homo sapiens
gaggacgtcatttaccacgtg

SEQ ID NO: 46508 - RNA, 21 nt, RNAi
ggacgucauuuaccacguguu

SEQ ID NO: 46509 - RNA, 21 nt, RNAi
uuccugcaguaaauggugcac

SEQ ID NO: 46510 - DNA, 21 bp, homo sapiens
gacgtcatttaccacgtgaaa

SEQ ID NO: 46511 - RNA, 21 nt, RNAi
cgucauuuaccacgugaaauu

SEQ ID NO: 46512 - RNA, 21 nt, RNAi
uugcaguaaauggugcacuuu

SEQ ID NO: 46513 - DNA, 21 bp, homo sapiens
gagaacggcgtggtccagatg

SEQ ID NO: 46514 - RNA, 21 nt, RNAi
gaacggcgugguccagauguu

SEQ ID NO: 46515 - RNA, 21 nt, RNAi
uucuugccgcaccaggucuac

SEQ ID NO: 46516 - DNA, 21 bp, homo sapiens
gaacggcgtggtccagatgaa

SEQ ID NO: 46517 - RNA, 21 nt, RNAi
acggcgugguccagaugaauu

SEQ ID NO: 46518 - RNA, 21 nt, RNAi
uuugccgcaccaggucuacuu

SEQ ID NO: 46519 - DNA, 21 bp, homo sapiens
gacgcggagatctccaggaag

SEQ ID NO: 46520 - RNA, 21 nt, RNAi
cgcggagaucuccaggaaguu

SEQ ID NO: 46521 - RNA, 21 nt, RNAi
uugcgccucuagagguccuuc

SEQ ID NO: 46522 - DNA, 21 bp, homo sapiens
gagatctccaggaagcgcgag

SEQ ID NO: 46523 - RNA, 21 nt, RNAi
gaucuccaggaagcgcgaguu

SEQ ID NO: 46524 - RNA, 21 nt, RNAi
uucuagagguccuucgcgcuc

SEQ ID NO: 46525 - DNA, 21 bp, homo sapiens
gatctccaggaagcgcgagac

SEQ ID NO: 46526 - RNA, 21 nt, RNAi
ucuccaggaagcgcgagacuu

SEQ ID NO: 46527 - RNA, 21 nt, RNAi
uuagagguccuucgcgcucug

SEQ ID NO: 46528 - DNA, 21 bp, homo sapiens
gaactctacgccaacgtggtg

SEQ ID NO: 46529 - RNA, 21 nt, RNAi
acucuacgccaacgugguguu

SEQ ID NO: 46530 - RNA, 21 nt, RNAi
uuugagaugcgguugcaccac

SEQ ID NO: 46531 - DNA, 21 bp, homo sapiens
gatgattctctgaacgactgt

SEQ ID NO: 46532 - RNA, 21 nt, RNAi
ugauucucugaacgacuguuu

SEQ ID NO: 46533 - RNA, 21 nt, RNAi
uuacuaagagacuugcugaca

SEQ ID NO: 46534 - DNA, 21 bp, homo sapiens
gattctctgaacgactgtcgg

SEQ ID NO: 46535 - RNA, 21 nt, RNAi
uucucugaacgacugucgguu

SEQ ID NO: 46536 - RNA, 21 nt, RNAi
uuaagagacuugcugacagcc

SEQ ID NO: 46537 - DNA, 21 bp, homo sapiens
gaacgactgtcggatcatctt

SEQ ID NO: 46538 - RNA, 21 nt, RNAi
acgacugucggaucaucuuuu

SEQ ID NO: 46539 - RNA, 21 nt, RNAi
uuugcugacagccuaguagaa

SEQ ID NO: 46540 - DNA, 21 bp, homo sapiens
gactgtcggatcatcttcgtg

SEQ ID NO: 46541 - RNA, 21 nt, RNAi
cugucggaucaucuucguguu

SEQ ID NO: 46542 - RNA, 21 nt, RNAi
uugacagccuaguagaagcac

SEQ ID NO: 46543 - DNA, 21 bp, homo sapiens
gatcatcttcgtggacgaagt

SEQ ID NO: 46544 - RNA, 21 nt, RNAi
ucaucuucguggacgaaguuu

SEQ ID NO: 46545 - RNA, 21 nt, RNAi
uuaguagaagcaccugcuuca

SEQ ID NO: 46546 - DNA, 21 bp, homo sapiens
gacgaagtcttcaagattgag

SEQ ID NO: 46547 - RNA, 21 nt, RNAi
cgaagucuucaagauugaguu

SEQ ID NO: 46548 - RNA, 21 nt, RNAi
uugcuucagaaguucuaacuc

SEQ ID NO: 46549 - DNA, 21 bp, homo sapiens
gaagtcttcaagattgagcgg

SEQ ID NO: 46550 - RNA, 21 nt, RNAi
agucuucaagauugagcgguu

SEQ ID NO: 46551 - RNA, 21 nt, RNAi
uuucagaaguucuaacucgcc

SEQ ID NO: 46552 - DNA, 21 bp, homo sapiens
gacgacgtgaacagactctgc

SEQ ID NO: 46553 - RNA, 21 nt, RNAi
cgacgugaacagacucugcuu

SEQ ID NO: 46554 - RNA, 21 nt, RNAi
uugcugcacuugucugagacg

SEQ ID NO: 46555 - DNA, 21 bp, homo sapiens
gacgtgaacagactctgcagg

SEQ ID NO: 46556 - RNA, 21 nt, RNAi
cgugaacagacucugcagguu

SEQ ID NO: 46557 - RNA, 21 nt, RNAi
uugcacuugucugagacgucc

SEQ ID NO: 46558 - DNA, 21 bp, homo sapiens
gacaagcagctcatgtgcgat

SEQ ID NO: 46559 - RNA, 21 nt, RNAi
caagcagcucaugugcgauuu

SEQ ID NO: 46560 - RNA, 21 nt, RNAi
uuguucgucgaguacacgcua

SEQ ID NO: 46561 - DNA, 21 bp, homo sapiens
gatgagtgcgacatggccttc

SEQ ID NO: 46562 - RNA, 21 nt, RNAi
ugagugcgacauggccuucuu

SEQ ID NO: 46563 - RNA, 21 nt, RNAi
uuacucacgcuguaccggaag

SEQ ID NO: 46564 - DNA, 21 bp, homo sapiens
gagtgcgacatggccttccac

SEQ ID NO: 46565 - RNA, 21 nt, RNAi
gugcgacauggccuuccacuu

SEQ ID NO: 46566 - RNA, 21 nt, RNAi
uucacgcuguaccggaaggug

SEQ ID NO: 46567 - DNA, 21 bp, homo sapiens
gacatggccttccacatctac

SEQ ID NO: 46568 - RNA, 21 nt, RNAi
cauggccuuccacaucuacuu

SEQ ID NO: 46569 - RNA, 21 nt, RNAi
uuguaccggaagguguagaug

SEQ ID NO: 46570 - DNA, 21 bp, homo sapiens
gagtgccggaatgatgccagc

SEQ ID NO: 46571 - RNA, 21 nt, RNAi
gugccggaaugaugccagcuu

SEQ ID NO: 46572 - RNA, 21 nt, RNAi
uucacggccuuacuacggucg

SEQ ID NO: 46573 - DNA, 21 bp, homo sapiens
gaatgatgccagcgaggtggt

SEQ ID NO: 46574 - RNA, 21 nt, RNAi
augaugccagcgaggugguuu

SEQ ID NO: 46575 - RNA, 21 nt, RNAi
uuuacuacggucgcuccacca

SEQ ID NO: 46576 - DNA, 21 bp, homo sapiens
gatgccagcgaggtggtactg

SEQ ID NO: 46577 - RNA, 21 nt, RNAi
ugccagcgaggugguacuguu

SEQ ID NO: 46578 - RNA, 21 nt, RNAi
uuacggucgcuccaccaugac

SEQ ID NO: 46579 - DNA, 21 bp, homo sapiens
gagagcggctgagagagagca

SEQ ID NO: 46580 - RNA, 21 nt, RNAi
gagcggcugagagagagcauu

SEQ ID NO: 46581 - RNA, 21 nt, RNAi
uucucgccgacucucucucgu

SEQ ID NO: 46582 - DNA, 21 bp, homo sapiens
gagcggctgagagagagcaag

SEQ ID NO: 46583 - RNA, 21 nt, RNAi
gcggcugagagagagcaaguu

SEQ ID NO: 46584 - RNA, 21 nt, RNAi
uucgccgacucucucucguuc

SEQ ID NO: 46585 - DNA, 21 bp, homo sapiens
gagagagagcaagaagaatgc

SEQ ID NO: 46586 - RNA, 21 nt, RNAi
gagagagcaagaagaaugcuu

SEQ ID NO: 46587 - RNA, 21 nt, RNAi
uucucucucguucuucuuacg

SEQ ID NO: 46588 - DNA, 21 bp, homo sapiens
gagagagcaagaagaatgcga

SEQ ID NO: 46589 - RNA, 21 nt, RNAi
gagagcaagaagaaugcgauu

SEQ ID NO: 46590 - RNA, 21 nt, RNAi
uucucucguucuucuuacgcu

SEQ ID NO: 46591 - DNA, 21 bp, homo sapiens
gagagcaagaagaatgcgaag

SEQ ID NO: 46592 - RNA, 21 nt, RNAi
gagcaagaagaaugcgaaguu

SEQ ID NO: 46593 - RNA, 21 nt, RNAi
uucucguucuucuuacgcuuc

SEQ ID NO: 46594 - DNA, 21 bp, homo sapiens
gagcaagaagaatgcgaagat

SEQ ID NO: 46595 - RNA, 21 nt, RNAi
gcaagaagaaugcgaagauuu

SEQ ID NO: 46596 - RNA, 21 nt, RNAi
uucguucuucuuacgcuucua

SEQ ID NO: 46597 - DNA, 21 bp, homo sapiens
gaagaatgcgaagatggcctc

SEQ ID NO: 46598 - RNA, 21 nt, RNAi
agaaugcgaagauggccucuu

SEQ ID NO: 46599 - RNA, 21 nt, RNAi
uuucuuacgcuucuaccggag

SEQ ID NO: 46600 - DNA, 21 bp, homo sapiens
gaatgcgaagatggcctcggc

SEQ ID NO: 46601 - RNA, 21 nt, RNAi
augcgaagauggccucggcuu

SEQ ID NO: 46602 - RNA, 21 nt, RNAi
uuuacgcuucuaccggagccg

SEQ ID NO: 46603 - DNA, 21 bp, homo sapiens
gaagatggcctcggccacatc

SEQ ID NO: 46604 - RNA, 21 nt, RNAi
agauggccucggccacaucuu

SEQ ID NO: 46605 - RNA, 21 nt, RNAi
uuucuaccggagccgguguag

SEQ ID NO: 46606 - DNA, 21 bp, homo sapiens
gagcaacgacggatcgtactc

SEQ ID NO: 46607 - RNA, 21 nt, RNAi
gcaacgacggaucguacucuu

SEQ ID NO: 46608 - RNA, 21 nt, RNAi
uucguugcugccuagcaugag

SEQ ID NO: 46609 - DNA, 21 bp, homo sapiens
gagatctttccggcaacaaga

SEQ ID NO: 46610 - RNA, 21 nt, RNAi
gaucuuuccggcaacaagauu

SEQ ID NO: 46611 - RNA, 21 nt, RNAi
uucuagaaaggccguuguucu

SEQ ID NO: 46612 - DNA, 21 bp, homo sapiens
gatctttccggcaacaagagg

SEQ ID NO: 46613 - RNA, 21 nt, RNAi
ucuuuccggcaacaagagguu

SEQ ID NO: 46614 - RNA, 21 nt, RNAi
uuagaaaggccguuguucucc

SEQ ID NO: 46615 - DNA, 21 bp, homo sapiens
gaggaccgcggaacagtcttg

SEQ ID NO: 46616 - RNA, 21 nt, RNAi
ggaccgcggaacagucuuguu

SEQ ID NO: 46617 - RNA, 21 nt, RNAi
uuccuggcgccuugucagaac

SEQ ID NO: 46618 - DNA, 21 bp, homo sapiens
gaccgcggaacagtcttgtga

SEQ ID NO: 46619 - RNA, 21 nt, RNAi
ccgcggaacagucuugugauu

SEQ ID NO: 46620 - RNA, 21 nt, RNAi
uuggcgccuugucagaacacu

SEQ ID NO: 46621 - DNA, 21 bp, homo sapiens
gaacagtcttgtgatcagaaa

SEQ ID NO: 46622 - RNA, 21 nt, RNAi
acagucuugugaucagaaauu

SEQ ID NO: 46623 - RNA, 21 nt, RNAi
uuugucagaacacuagucuuu

SEQ ID NO: 46624 - DNA, 21 bp, homo sapiens
gatcagaaactcaccaacacc

SEQ ID NO: 46625 - RNA, 21 nt, RNAi
ucagaaacucaccaacaccuu

SEQ ID NO: 46626 - RNA, 21 nt, RNAi
uuagucuuugagugguugugg

SEQ ID NO: 46627 - DNA, 21 bp, homo sapiens
gaaactcaccaacaccaacag

SEQ ID NO: 46628 - RNA, 21 nt, RNAi
aacucaccaacaccaacaguu

SEQ ID NO: 46629 - RNA, 21 nt, RNAi
uuuugagugguugugguuguc

SEQ ID NO: 46630 - DNA, 21 bp, homo sapiens
gatggcatctacaaggttgtg

SEQ ID NO: 46631 - RNA, 21 nt, RNAi
uggcaucuacaagguuguguu

SEQ ID NO: 46632 - RNA, 21 nt, RNAi
uuaccguagauguuccaacac

SEQ ID NO: 46633 - DNA, 21 bp, homo sapiens
gaaggaccggatcaagaagct

SEQ ID NO: 46634 - RNA, 21 nt, RNAi
aggaccggaucaagaagcuuu

SEQ ID NO: 46635 - RNA, 21 nt, RNAi
uuuccuggccuaguucuucga

SEQ ID NO: 46636 - DNA, 21 bp, homo sapiens
gaccatgcagtatccagaagg

SEQ ID NO: 46637 - RNA, 21 nt, RNAi
ccaugcaguauccagaagguu

SEQ ID NO: 46638 - RNA, 21 nt, RNAi
uugguacgucauaggucuucc

SEQ ID NO: 46639 - DNA, 21 bp, homo sapiens
gagagcgagagaaggagaaca

SEQ ID NO: 46640 - RNA, 21 nt, RNAi
gagcgagagaaggagaacauu

SEQ ID NO: 46641 - RNA, 21 nt, RNAi
uucucgcucucuuccucuugu

SEQ ID NO: 46642 - DNA, 21 bp, homo sapiens
gagcgagagaaggagaacagc

SEQ ID NO: 46643 - RNA, 21 nt, RNAi
gcgagagaaggagaacagcuu

SEQ ID NO: 46644 - RNA, 21 nt, RNAi
uucgcucucuuccucuugucg

SEQ ID NO: 46645 - DNA, 21 bp, homo sapiens
gagagaaggagaacagcaaga

SEQ ID NO: 46646 - RNA, 21 nt, RNAi
gagaaggagaacagcaagauu

SEQ ID NO: 46647 - RNA, 21 nt, RNAi
uucucuuccucuugucguucu

SEQ ID NO: 46648 - DNA, 21 bp, homo sapiens
gagaaggagaacagcaagagg

SEQ ID NO: 46649 - RNA, 21 nt, RNAi
gaaggagaacagcaagagguu

SEQ ID NO: 46650 - RNA, 21 nt, RNAi
uucuuccucuugucguucucc

SEQ ID NO: 46651 - DNA, 21 bp, homo sapiens
gagcagcctcatcagagagga

SEQ ID NO: 46652 - RNA, 21 nt, RNAi
gcagccucaucagagaggauu

SEQ ID NO: 46653 - RNA, 21 nt, RNAi
uucgucggaguagucucuccu

SEQ ID NO: 46654 - DNA, 21 bp, homo sapiens
gagaggacaagagcaacgcca

SEQ ID NO: 46655 - RNA, 21 nt, RNAi
gaggacaagagcaacgccauu

SEQ ID NO: 46656 - RNA, 21 nt, RNAi
uucuccuguucucguugcggu

SEQ ID NO: 46657 - DNA, 21 bp, homo sapiens
gaggacaagagcaacgccaag

SEQ ID NO: 46658 - RNA, 21 nt, RNAi
ggacaagagcaacgccaaguu

SEQ ID NO: 46659 - RNA, 21 nt, RNAi
uuccuguucucguugcgguuc

SEQ ID NO: 46660 - DNA, 21 bp, homo sapiens
gacaagagcaacgccaagctg

SEQ ID NO: 46661 - RNA, 21 nt, RNAi
caagagcaacgccaagcuguu

SEQ ID NO: 46662 - RNA, 21 nt, RNAi
uuguucucguugcgguucgac

SEQ ID NO: 46663 - DNA, 21 bp, homo sapiens
gagcaacgccaagctgtggaa

SEQ ID NO: 46664 - RNA, 21 nt, RNAi
gcaacgccaagcuguggaauu

SEQ ID NO: 46665 - RNA, 21 nt, RNAi
uucguugcgguucgacaccuu

SEQ ID NO: 46666 - DNA, 21 bp, homo sapiens
gaatgaggtcctggcgtcact

SEQ ID NO: 46667 - RNA, 21 nt, RNAi
augagguccuggcgucacuuu

SEQ ID NO: 46668 - RNA, 21 nt, RNAi
uuuacuccaggaccgcaguga

SEQ ID NO: 46669 - DNA, 21 bp, homo sapiens
gaggtcctggcgtcactcaag

SEQ ID NO: 46670 - RNA, 21 nt, RNAi
gguccuggcgucacucaaguu

SEQ ID NO: 46671 - RNA, 21 nt, RNAi
uuccaggaccgcagugaguuc

SEQ ID NO: 46672 - DNA, 21 bp, homo sapiens
gagtaaagtggaggagacgtt

SEQ ID NO: 46673 - RNA, 21 nt, RNAi
guaaaguggaggagacguuuu

SEQ ID NO: 46674 - RNA, 21 nt, RNAi
uucauuucaccuccucugcaa

SEQ ID NO: 46675 - DNA, 21 bp, homo sapiens
gaggagacgttccagtgtatc

SEQ ID NO: 46676 - RNA, 21 nt, RNAi
ggagacguuccaguguaucuu

SEQ ID NO: 46677 - RNA, 21 nt, RNAi
uuccucugcaaggucacauag

SEQ ID NO: 46678 - DNA, 21 bp, homo sapiens
gagacgttccagtgtatctgc

SEQ ID NO: 46679 - RNA, 21 nt, RNAi
gacguuccaguguaucugcuu

SEQ ID NO: 46680 - RNA, 21 nt, RNAi
uucugcaaggucacauagacg

SEQ ID NO: 46681 - DNA, 21 bp, homo sapiens
gacgttccagtgtatctgctg

SEQ ID NO: 46682 - RNA, 21 nt, RNAi
cguuccaguguaucugcuguu

SEQ ID NO: 46683 - RNA, 21 nt, RNAi
uugcaaggucacauagacgac

SEQ ID NO: 46684 - DNA, 21 bp, homo sapiens
gaccgtgtgccagcacaacgt

SEQ ID NO: 46685 - RNA, 21 nt, RNAi
ccgugugccagcacaacguuu

SEQ ID NO: 46686 - RNA, 21 nt, RNAi
uuggcacacggucguguugca

SEQ ID NO: 46687 - DNA, 21 bp, homo sapiens
gactgcctggacagatccttt

SEQ ID NO: 46688 - RNA, 21 nt, RNAi
cugccuggacagauccuuuuu

SEQ ID NO: 46689 - RNA, 21 nt, RNAi
uugacggaccugucuaggaaa

SEQ ID NO: 46690 - DNA, 21 bp, homo sapiens
gaaccagcctctgcagaccgt

SEQ ID NO: 46691 - RNA, 21 nt, RNAi
accagccucugcagaccguuu

SEQ ID NO: 46692 - RNA, 21 nt, RNAi
uuuggucggagacgucuggca

SEQ ID NO: 46693 - DNA, 21 bp, homo sapiens
gaccgtcctcaaccagctctt

SEQ ID NO: 46694 - RNA, 21 nt, RNAi
ccguccucaaccagcucuuuu

SEQ ID NO: 46695 - RNA, 21 nt, RNAi
uuggcaggaguuggucgagaa

SEQ ID NO: 46696 - DNA, 21 bp, homo sapiens
tacgaggtccgcctgaatgac

SEQ ID NO: 46697 - RNA, 21 nt, RNAi
cgagguccgccugaaugacuu

SEQ ID NO: 46698 - RNA, 21 nt, RNAi
uugcuccaggcggacuuacug

SEQ ID NO: 46699 - DNA, 21 bp, homo sapiens
tacaaggtcaatgagtacgtc

SEQ ID NO: 46700 - RNA, 21 nt, RNAi
caaggucaaugaguacgucuu

SEQ ID NO: 46701 - RNA, 21 nt, RNAi
uuguuccaguuacucaugcag

SEQ ID NO: 46702 - DNA, 21 bp, homo sapiens
taccacgtgaaatacgacgac

SEQ ID NO: 46703 - RNA, 21 nt, RNAi
ccacgugaaauacgacgacuu

SEQ ID NO: 46704 - RNA, 21 nt, RNAi
uuggugcacuuuaugcugcug

SEQ ID NO: 46705 - DNA, 21 bp, homo sapiens
tacgacgcggagatctccagg

SEQ ID NO: 46706 - RNA, 21 nt, RNAi
cgacgcggagaucuccagguu

SEQ ID NO: 46707 - RNA, 21 nt, RNAi
uugcugcgccucuagaggucc

SEQ ID NO: 46708 - DNA, 21 bp, homo sapiens
tatgaggatgatgtggaccat

SEQ ID NO: 46709 - RNA, 21 nt, RNAi
ugaggaugauguggaccauuu

SEQ ID NO: 46710 - RNA, 21 nt, RNAi
uuacuccuacuacaccuggua

SEQ ID NO: 46711 - DNA, 21 bp, homo sapiens
tagtggtggtcgagatctttc

SEQ ID NO: 46712 - RNA, 21 nt, RNAi
gugguggucgagaucuuucuu

SEQ ID NO: 46713 - RNA, 21 nt, RNAi
uucaccaccagcucuagaaag

SEQ ID NO: 46714 - DNA, 21 bp, homo sapiens
tacgatggcatctacaaggtt

SEQ ID NO: 46715 - RNA, 21 nt, RNAi
cgauggcaucuacaagguuuu

SEQ ID NO: 46716 - RNA, 21 nt, RNAi
uugcuaccguagauguuccaa

SEQ ID NO: 46717 - DNA, 21 bp, homo sapiens
tacaaggttgtgaaatactgg

SEQ ID NO: 46718 - RNA, 21 nt, RNAi
caagguugugaaauacugguu

SEQ ID NO: 46719 - RNA, 21 nt, RNAi
uuguuccaacacuuuaugacc

SEQ ID NO: 46720 - DNA, 21 bp, homo sapiens
tatccagaaggctacctggaa

SEQ ID NO: 46721 - RNA, 21 nt, RNAi
uccagaaggcuaccuggaauu

SEQ ID NO: 46722 - RNA, 21 nt, RNAi
uuaggucuuccgauggaccuu

SEQ ID NO: 46723 - DNA, 21 bp, homo sapiens
taaagtggaggagacgttcca

SEQ ID NO: 46724 - RNA, 21 nt, RNAi
aaguggaggagacguuccauu

SEQ ID NO: 46725 - RNA, 21 nt, RNAi
uuuucaccuccucugcaaggu

SEQ ID NO: 46726 - DNA, 21 bp, homo sapiens
tatctgctgtcaggagctggt

SEQ ID NO: 46727 - RNA, 21 nt, RNAi
ucugcugucaggagcugguuu

SEQ ID NO: 46728 - RNA, 21 nt, RNAi
uuagacgacaguccucgacca

SEQ ID NO: 46729 - DNA, 21 bp, homo sapiens
tatgccatgcaggtgaaccag

SEQ ID NO: 46730 - RNA, 21 nt, RNAi
ugccaugcaggugaaccaguu

SEQ ID NO: 46731 - RNA, 21 nt, RNAi
uuacgguacguccacuugguc

SEQ ID NO: 46732 - DNA, 21 bp, homo sapiens
aaggtcaatgagtacgtcgat

SEQ ID NO: 46733 - RNA, 21 nt, RNAi
ggucaaugaguacgucgauuu

SEQ ID NO: 46734 - RNA, 21 nt, RNAi
uuccaguuacucaugcagcua

SEQ ID NO: 46735 - DNA, 21 bp, homo sapiens
aacgactgtcggatcatcttc

SEQ ID NO: 46736 - RNA, 21 nt, RNAi
cgacugucggaucaucuucuu

SEQ ID NO: 46737 - RNA, 21 nt, RNAi
uugcugacagccuaguagaag

SEQ ID NO: 46738 - DNA, 21 bp, homo sapiens
aagtcttcaagattgagcggc

SEQ ID NO: 46739 - RNA, 21 nt, RNAi
gucuucaagauugagcggcuu

SEQ ID NO: 46740 - RNA, 21 nt, RNAi
uucagaaguucuaacucgccg

SEQ ID NO: 46741 - DNA, 21 bp, homo sapiens
cagagtgagtcagacaagtcc

SEQ ID NO: 46742 - RNA, 21 nt, RNAi
gagugagucagacaaguccuu

SEQ ID NO: 46743 - RNA, 21 nt, RNAi
uucucacucagucuguucagg

SEQ ID NO: 46744 - DNA, 21 bp, homo sapiens
caaggtcaatgagtacgtcga

SEQ ID NO: 46745 - RNA, 21 nt, RNAi
aggucaaugaguacgucgauu

SEQ ID NO: 46746 - RNA, 21 nt, RNAi
uuuccaguuacucaugcagcu

SEQ ID NO: 46747 - DNA, 21 bp, homo sapiens
catttaccacgtgaaatacga

SEQ ID NO: 46748 - RNA, 21 nt, RNAi
uuuaccacgugaaauacgauu

SEQ ID NO: 46749 - RNA, 21 nt, RNAi
uuaaauggugcacuuuaugcu

SEQ ID NO: 46750 - DNA, 21 bp, homo sapiens
caccatcatcaagtggcagga

SEQ ID NO: 46751 - RNA, 21 nt, RNAi
ccaucaucaaguggcaggauu

SEQ ID NO: 46752 - RNA, 21 nt, RNAi
uugguaguaguucaccguccu

SEQ ID NO: 46753 - DNA, 21 bp, homo sapiens
catcatcaagtggcaggacct

SEQ ID NO: 46754 - RNA, 21 nt, RNAi
ucaucaaguggcaggaccuuu

SEQ ID NO: 46755 - RNA, 21 nt, RNAi
uuaguaguucaccguccugga

SEQ ID NO: 46756 - DNA, 21 bp, homo sapiens
caggtggtcatgctcaactac

SEQ ID NO: 46757 - RNA, 21 nt, RNAi
gguggucaugcucaacuacuu

SEQ ID NO: 46758 - RNA, 21 nt, RNAi
uuccaccaguacgaguugaug

SEQ ID NO: 46759 - DNA, 21 bp, homo sapiens
caaggacgacgtgaacagact

SEQ ID NO: 46760 - RNA, 21 nt, RNAi
aggacgacgugaacagacuuu

SEQ ID NO: 46761 - RNA, 21 nt, RNAi
uuuccugcugcacuugucuga

SEQ ID NO: 46762 - DNA, 21 bp, homo sapiens
caagcagctcatgtgcgatga

SEQ ID NO: 46763 - RNA, 21 nt, RNAi
agcagcucaugugcgaugauu

SEQ ID NO: 46764 - RNA, 21 nt, RNAi
uuucgucgaguacacgcuacu

SEQ ID NO: 46765 - DNA, 21 bp, homo sapiens
catgtgcgatgagtgcgacat

SEQ ID NO: 46766 - RNA, 21 nt, RNAi
ugugcgaugagugcgacauuu

SEQ ID NO: 46767 - RNA, 21 nt, RNAi
uuacacgcuacucacgcugua

SEQ ID NO: 46768 - DNA, 21 bp, homo sapiens
caccaaggaatgtaccatcgt

SEQ ID NO: 46769 - RNA, 21 nt, RNAi
ccaaggaauguaccaucguuu

SEQ ID NO: 46770 - RNA, 21 nt, RNAi
uugguuccuuacaugguagca

SEQ ID NO: 46771 - DNA, 21 bp, homo sapiens
cagtcttgtgatcagaaactc

SEQ ID NO: 46772 - RNA, 21 nt, RNAi
gucuugugaucagaaacucuu

SEQ ID NO: 46773 - RNA, 21 nt, RNAi
uucagaacacuagucuuugag

SEQ ID NO: 46774 - DNA, 21 bp, homo sapiens
cagaaactcaccaacaccaac

SEQ ID NO: 46775 - RNA, 21 nt, RNAi
gaaacucaccaacaccaacuu

SEQ ID NO: 46776 - RNA, 21 nt, RNAi
uucuuugagugguugugguug

SEQ ID NO: 46777 - DNA, 21 bp, homo sapiens
cagcctcatcagagaggacaa

SEQ ID NO: 46778 - RNA, 21 nt, RNAi
gccucaucagagaggacaauu

SEQ ID NO: 46779 - RNA, 21 nt, RNAi
uucggaguagucucuccuguu

SEQ ID NO: 46780 - DNA, 21 bp, homo sapiens
gaggaggacgtcatttaccac

SEQ ID NO: 46781 - RNA, 21 nt, RNAi
ggaggacgucauuuaccacuu

SEQ ID NO: 46782 - RNA, 21 nt, RNAi
uuccuccugcaguaaauggug

SEQ ID NO: 46783 - DNA, 21 bp, homo sapiens
gaggacgtcatttaccacgtg

SEQ ID NO: 46784 - RNA, 21 nt, RNAi
ggacgucauuuaccacguguu

SEQ ID NO: 46785 - RNA, 21 nt, RNAi
uuccugcaguaaauggugcac

SEQ ID NO: 46786 - DNA, 21 bp, homo sapiens
gacgtcatttaccacgtgaaa

SEQ ID NO: 46787 - RNA, 21 nt, RNAi
cgucauuuaccacgugaaauu

SEQ ID NO: 46788 - RNA, 21 nt, RNAi
uugcaguaaauggugcacuuu

SEQ ID NO: 46789 - DNA, 21 bp, homo sapiens
gattctctgaacgactgtcgg

SEQ ID NO: 46790 - RNA, 21 nt, RNAi
uucucugaacgacugucgguu

SEQ ID NO: 46791 - RNA, 21 nt, RNAi
uuaagagacuugcugacagcc

SEQ ID NO: 46792 - DNA, 21 bp, homo sapiens
gaacgactgtcggatcatctt

SEQ ID NO: 46793 - RNA, 21 nt, RNAi
acgacugucggaucaucuuuu

SEQ ID NO: 46794 - RNA, 21 nt, RNAi
uuugcugacagccuaguagaa

SEQ ID NO: 46795 - DNA, 21 bp, homo sapiens
gactgtcggatcatcttcgtg

SEQ ID NO: 46796 - RNA, 21 nt, RNAi
cugucggaucaucuucguguu

SEQ ID NO: 46797 - RNA, 21 nt, RNAi
uugacagccuaguagaagcac

SEQ ID NO: 46798 - DNA, 21 bp, homo sapiens
gacgaagtcttcaagattgag

SEQ ID NO: 46799 - RNA, 21 nt, RNAi
cgaagucuucaagauugaguu

SEQ ID NO: 46800 - RNA, 21 nt, RNAi
uugcuucagaaguucuaacuc

SEQ ID NO: 46801 - DNA, 21 bp, homo sapiens
gaagtcttcaagattgagcgg

SEQ ID NO: 46802 - RNA, 21 nt, RNAi
agucuucaagauugagcgguu

SEQ ID NO: 46803 - RNA, 21 nt, RNAi
uuucagaaguucuaacucgcc

SEQ ID NO: 46804 - DNA, 21 bp, homo sapiens
gacatggccttccacatctac

SEQ ID NO: 46805 - RNA, 21 nt, RNAi
cauggccuuccacaucuacuu

SEQ ID NO: 46806 - RNA, 21 nt, RNAi
uuguaccggaagguguagaug

SEQ ID NO: 46807 - DNA, 21 bp, homo sapiens
gagcaagaagaatgcgaagat

SEQ ID NO: 46808 - RNA, 21 nt, RNAi
gcaagaagaaugcgaagauuu

SEQ ID NO: 46809 - RNA, 21 nt, RNAi
uucguucuucuuacgcuucua

SEQ ID NO: 46810 - DNA, 21 bp, homo sapiens
gatggcatctacaaggttgtg

SEQ ID NO: 46811 - RNA, 21 nt, RNAi
uggcaucuacaagguuguguu

SEQ ID NO: 46812 - RNA, 21 nt, RNAi
uuaccguagauguuccaacac

SEQ ID NO: 46813 - DNA, 21 bp, homo sapiens
gaaggaccggatcaagaagct

SEQ ID NO: 46814 - RNA, 21 nt, RNAi
aggaccggaucaagaagcuuu

SEQ ID NO: 46815 - RNA, 21 nt, RNAi
uuuccuggccuaguucuucga

SEQ ID NO: 46816 - DNA, 21 bp, homo sapiens
gaccatgcagtatccagaagg

SEQ ID NO: 46817 - RNA, 21 nt, RNAi
ccaugcaguauccagaagguu

SEQ ID NO: 46818 - RNA, 21 nt, RNAi
uugguacgucauaggucuucc

SEQ ID NO: 46819 - DNA, 21 bp, homo sapiens
gaggagacgttccagtgtatc

SEQ ID NO: 46820 - RNA, 21 nt, RNAi
ggagacguuccaguguaucuu

SEQ ID NO: 46821 - RNA, 21 nt, RNAi
uuccucugcaaggucacauag

SEQ ID NO: 46822 - DNA, 21 bp, homo sapiens
gagacgttccagtgtatctgc

SEQ ID NO: 46823 - RNA, 21 nt, RNAi
gacguuccaguguaucugcuu

SEQ ID NO: 46824 - RNA, 21 nt, RNAi
uucugcaaggucacauagacg

SEQ ID NO: 46825 - DNA, 21 bp, homo sapiens
tacaaggtcaatgagtacgtc

SEQ ID NO: 46826 - RNA, 21 nt, RNAi
caaggucaaugaguacgucuu

SEQ ID NO: 46827 - RNA, 21 nt, RNAi
uuguuccaguuacucaugcag

SEQ ID NO: 46828 - DNA, 21 bp, homo sapiens
taccacgtgaaatacgacgac

SEQ ID NO: 46829 - RNA, 21 nt, RNAi
ccacgugaaauacgacgacuu

SEQ ID NO: 46830 - RNA, 21 nt, RNAi
uuggugcacuuuaugcugcug

SEQ ID NO: 46831 - DNA, 21 bp, homo sapiens
tagtggtggtcgagatctttc

SEQ ID NO: 46832 - RNA, 21 nt, RNAi
gugguggucgagaucuuucuu

SEQ ID NO: 46833 - RNA, 21 nt, RNAi
uucaccaccagcucuagaaag

SEQ ID NO: 46834 - DNA, 21 bp, homo sapiens
aacaccaggcggaacgaagat

SEQ ID NO: 46835 - RNA, 21 nt, RNAi
caccaggcggaacgaagauuu

SEQ ID NO: 46836 - RNA, 21 nt, RNAi
uugugguccgccuugcuucua

SEQ ID NO: 46837 - DNA, 21 bp, homo sapiens
aagtccttacactccttattg

SEQ ID NO: 46838 - RNA, 21 nt, RNAi
guccuuacacuccuuauuguu

SEQ ID NO: 46839 - RNA, 21 nt, RNAi
uucaggaaugugaggaauaac

SEQ ID NO: 46840 - DNA, 21 bp, homo sapiens
aagacggtgcttacctgttcc

SEQ ID NO: 46841 - RNA, 21 nt, RNAi
gacggugcuuaccuguuccuu

SEQ ID NO: 46842 - RNA, 21 nt, RNAi
uucugccacgaauggacaagg

SEQ ID NO: 46843 - DNA, 21 bp, homo sapiens
aaatgcgtggataccttagac

SEQ ID NO: 46844 - RNA, 21 nt, RNAi
augcguggauaccuuagacuu

SEQ ID NO: 46845 - RNA, 21 nt, RNAi
uuuacgcaccuauggaaucug

SEQ ID NO: 46846 - DNA, 21 bp, homo sapiens
aatgcgtggataccttagact

SEQ ID NO: 46847 - RNA, 21 nt, RNAi
ugcguggauaccuuagacuuu

SEQ ID NO: 46848 - RNA, 21 nt, RNAi
uuacgcaccuauggaaucuga

SEQ ID NO: 46849 - DNA, 21 bp, homo sapiens
aatggattcaggcagatgaac

SEQ ID NO: 46850 - RNA, 21 nt, RNAi
uggauucaggcagaugaacuu

SEQ ID NO: 46851 - RNA, 21 nt, RNAi
uuaccuaaguccgucuacuug

SEQ ID NO: 46852 - DNA, 21 bp, homo sapiens
aaactttacgagtagccaaag

SEQ ID NO: 46853 - RNA, 21 nt, RNAi
acuuuacgaguagccaaaguu

SEQ ID NO: 46854 - RNA, 21 nt, RNAi
uuugaaaugcucaucgguuuc

SEQ ID NO: 46855 - DNA, 21 bp, homo sapiens
aactttacgagtagccaaagc

SEQ ID NO: 46856 - RNA, 21 nt, RNAi
cuuuacgaguagccaaagcuu

SEQ ID NO: 46857 - RNA, 21 nt, RNAi
uugaaaugcucaucgguuucg

SEQ ID NO: 46858 - DNA, 21 bp, homo sapiens
aaaggtacattgagaacaaca

SEQ ID NO: 46859 - RNA, 21 nt, RNAi
agguacauugagaacaacauu

SEQ ID NO: 46860 - RNA, 21 nt, RNAi
uuuccauguaacucuuguugu

SEQ ID NO: 46861 - DNA, 21 bp, homo sapiens
aaggtacattgagaacaacag

SEQ ID NO: 46862 - RNA, 21 nt, RNAi
gguacauugagaacaacaguu

SEQ ID NO: 46863 - RNA, 21 nt, RNAi
uuccauguaacucuuguuguc

SEQ ID NO: 46864 - DNA, 21 bp, homo sapiens
aacaacagcattgtctccaag

SEQ ID NO: 46865 - RNA, 21 nt, RNAi
caacagcauugucuccaaguu

SEQ ID NO: 46866 - RNA, 21 nt, RNAi
uuguugucguaacagagguuc

SEQ ID NO: 46867 - DNA, 21 bp, homo sapiens
aacagcattgtctccaagcag

SEQ ID NO: 46868 - RNA, 21 nt, RNAi
cagcauugucuccaagcaguu

SEQ ID NO: 46869 - RNA, 21 nt, RNAi
uugucguaacagagguucguc

SEQ ID NO: 46870 - DNA, 21 bp, homo sapiens
aagcagctgaagcctgccacc

SEQ ID NO: 46871 - RNA, 21 nt, RNAi
gcagcugaagccugccaccuu

SEQ ID NO: 46872 - RNA, 21 nt, RNAi
uucgucgacuucggacggugg

SEQ ID NO: 46873 - DNA, 21 bp, homo sapiens
aagcctgccaccaagacctac

SEQ ID NO: 46874 - RNA, 21 nt, RNAi
gccugccaccaagaccuacuu

SEQ ID NO: 46875 - RNA, 21 nt, RNAi
uucggacggugguucuggaug

SEQ ID NO: 46876 - DNA, 21 bp, homo sapiens
aagacctacataagagatggc

SEQ ID NO: 46877 - RNA, 21 nt, RNAi
gaccuacauaagagauggcuu

SEQ ID NO: 46878 - RNA, 21 nt, RNAi
uucuggauguauucucuaccg

SEQ ID NO: 46879 - DNA, 21 bp, homo sapiens
aagagatggcatcaagaagca

SEQ ID NO: 46880 - RNA, 21 nt, RNAi
gagauggcaucaagaagcauu

SEQ ID NO: 46881 - RNA, 21 nt, RNAi
uucucuaccguaguucuucgu

SEQ ID NO: 46882 - DNA, 21 bp, homo sapiens
aagaagcagcagattgattcc

SEQ ID NO: 46883 - RNA, 21 nt, RNAi
gaagcagcagauugauuccuu

SEQ ID NO: 46884 - RNA, 21 nt, RNAi
uucuucgucgucuaacuaagg

SEQ ID NO: 46885 - DNA, 21 bp, homo sapiens
aagcagcagattgattccatc

SEQ ID NO: 46886 - RNA, 21 nt, RNAi
gcagcagauugauuccaucuu

SEQ ID NO: 46887 - RNA, 21 nt, RNAi
uucgucgucuaacuaagguag

SEQ ID NO: 46888 - DNA, 21 bp, homo sapiens
aaacacagcttacatgagtaa

SEQ ID NO: 46889 - RNA, 21 nt, RNAi
acacagcuuacaugaguaauu

SEQ ID NO: 46890 - RNA, 21 nt, RNAi
uuugugucgaauguacucauu

SEQ ID NO: 46891 - DNA, 21 bp, homo sapiens
aacacagcttacatgagtaat

SEQ ID NO: 46892 - RNA, 21 nt, RNAi
cacagcuuacaugaguaauuu

SEQ ID NO: 46893 - RNA, 21 nt, RNAi
uugugucgaauguacucauua

SEQ ID NO: 46894 - DNA, 21 bp, homo sapiens
aaaggtcgtgtgtggctatct

SEQ ID NO: 46895 - RNA, 21 nt, RNAi
aggucguguguggcuaucuuu

SEQ ID NO: 46896 - RNA, 21 nt, RNAi
uuuccagcacacaccgauaga

SEQ ID NO: 46897 - DNA, 21 bp, homo sapiens
aaggtcgtgtgtggctatctc

SEQ ID NO: 46898 - RNA, 21 nt, RNAi
ggucguguguggcuaucucuu

SEQ ID NO: 46899 - RNA, 21 nt, RNAi
uuccagcacacaccgauagag

SEQ ID NO: 46900 - DNA, 21 bp, homo sapiens
aatgaagaagaggagtggact

SEQ ID NO: 46901 - RNA, 21 nt, RNAi
ugaagaagaggaguggacuuu

SEQ ID NO: 46902 - RNA, 21 nt, RNAi
uuacuucuucuccucaccuga

SEQ ID NO: 46903 - DNA, 21 bp, homo sapiens
aagaagaggagtggacttgtg

SEQ ID NO: 46904 - RNA, 21 nt, RNAi
gaagaggaguggacuuguguu

SEQ ID NO: 46905 - RNA, 21 nt, RNAi
uucuucuccucaccugaacac

SEQ ID NO: 46906 - DNA, 21 bp, homo sapiens
aagaggagtggacttgtgccg

SEQ ID NO: 46907 - RNA, 21 nt, RNAi
gaggaguggacuugugccguu

SEQ ID NO: 46908 - RNA, 21 nt, RNAi
uucuccucaccugaacacggc

SEQ ID NO: 46909 - DNA, 21 bp, homo sapiens
aagtgcaaactttcgccaacc

SEQ ID NO: 46910 - RNA, 21 nt, RNAi
gugcaaacuuucgccaaccuu

SEQ ID NO: 46911 - RNA, 21 nt, RNAi
uucacguuugaaagcgguugg

SEQ ID NO: 46912 - DNA, 21 bp, homo sapiens
aaactttcgccaaccgtggtt

SEQ ID NO: 46913 - RNA, 21 nt, RNAi
acuuucgccaaccgugguuuu

SEQ ID NO: 46914 - RNA, 21 nt, RNAi
uuugaaagcgguuggcaccaa

SEQ ID NO: 46915 - DNA, 21 bp, homo sapiens
aactttcgccaaccgtggttg

SEQ ID NO: 46916 - RNA, 21 nt, RNAi
cuuucgccaaccgugguuguu

SEQ ID NO: 46917 - RNA, 21 nt, RNAi
uugaaagcgguuggcaccaac

SEQ ID NO: 46918 - DNA, 21 bp, homo sapiens
aaccgtggttggcttgtccag

SEQ ID NO: 46919 - RNA, 21 nt, RNAi
ccgugguuggcuuguccaguu

SEQ ID NO: 46920 - RNA, 21 nt, RNAi
uuggcaccaaccgaacagguc

SEQ ID NO: 46921 - DNA, 21 bp, homo sapiens
aaactgttgacagtggataca

SEQ ID NO: 46922 - RNA, 21 nt, RNAi
acuguugacaguggauacauu

SEQ ID NO: 46923 - RNA, 21 nt, RNAi
uuugacaacugucaccuaugu

SEQ ID NO: 46924 - DNA, 21 bp, homo sapiens
aactgttgacagtggatacag

SEQ ID NO: 46925 - RNA, 21 nt, RNAi
cuguugacaguggauacaguu

SEQ ID NO: 46926 - RNA, 21 nt, RNAi
uugacaacugucaccuauguc

SEQ ID NO: 46927 - DNA, 21 bp, homo sapiens
aagaggagcgatcctgttaat

SEQ ID NO: 46928 - RNA, 21 nt, RNAi
gaggagcgauccuguuaauuu

SEQ ID NO: 46929 - RNA, 21 nt, RNAi
uucuccucgcuaggacaauua

SEQ ID NO: 46930 - DNA, 21 bp, homo sapiens
aatccttatcacataggttct

SEQ ID NO: 46931 - RNA, 21 nt, RNAi
uccuuaucacauagguucuuu

SEQ ID NO: 46932 - RNA, 21 nt, RNAi
uuaggaauaguguauccaaga

SEQ ID NO: 46933 - DNA, 21 bp, homo sapiens
aacgacagtgagatatccagt

SEQ ID NO: 46934 - RNA, 21 nt, RNAi
cgacagugagauauccaguuu

SEQ ID NO: 46935 - RNA, 21 nt, RNAi
uugcugucacucuauagguca

SEQ ID NO: 46936 - DNA, 21 bp, homo sapiens
aagaaacagctccagagagaa

SEQ ID NO: 46937 - RNA, 21 nt, RNAi
gaaacagcuccagagagaauu

SEQ ID NO: 46938 - RNA, 21 nt, RNAi
uucuuugucgaggucucucuu

SEQ ID NO: 46939 - DNA, 21 bp, homo sapiens
aaacagctccagagagaaatg

SEQ ID NO: 46940 - RNA, 21 nt, RNAi
acagcuccagagagaaauguu

SEQ ID NO: 46941 - RNA, 21 nt, RNAi
uuugucgaggucucucuuuac

SEQ ID NO: 46942 - DNA, 21 bp, homo sapiens
aacagctccagagagaaatgc

SEQ ID NO: 46943 - RNA, 21 nt, RNAi
cagcuccagagagaaaugcuu

SEQ ID NO: 46944 - RNA, 21 nt, RNAi
uugucgaggucucucuuuacg

SEQ ID NO: 46945 - DNA, 21 bp, homo sapiens
aaatgcatcgcagtgtgaagg

SEQ ID NO: 46946 - RNA, 21 nt, RNAi
augcaucgcagugugaagguu

SEQ ID NO: 46947 - RNA, 21 nt, RNAi
uuuacguagcgucacacuucc

SEQ ID NO: 46948 - DNA, 21 bp, homo sapiens
aatgcatcgcagtgtgaaggc

SEQ ID NO: 46949 - RNA, 21 nt, RNAi
ugcaucgcagugugaaggcuu

SEQ ID NO: 46950 - RNA, 21 nt, RNAi
uuacguagcgucacacuuccg

SEQ ID NO: 46951 - DNA, 21 bp, homo sapiens
aaggccaatggccaagtgtct

SEQ ID NO: 46952 - RNA, 21 nt, RNAi
ggccaauggccaagugucuuu

SEQ ID NO: 46953 - RNA, 21 nt, RNAi
uuccgguuaccgguucacaga

SEQ ID NO: 46954 - DNA, 21 bp, homo sapiens
aatggccaagtgtctctacct

SEQ ID NO: 46955 - RNA, 21 nt, RNAi
uggccaagugucucuaccuuu

SEQ ID NO: 46956 - RNA, 21 nt, RNAi
uuaccgguucacagagaugga

SEQ ID NO: 46957 - DNA, 21 bp, homo sapiens
aagtgtctctacctcatttcc

SEQ ID NO: 46958 - RNA, 21 nt, RNAi
gugucucuaccucauuuccuu

SEQ ID NO: 46959 - RNA, 21 nt, RNAi
uucacagagauggaguaaagg

SEQ ID NO: 46960 - DNA, 21 bp, homo sapiens
aaagctgaagctggagttgga

SEQ ID NO: 46961 - RNA, 21 nt, RNAi
agcugaagcuggaguuggauu

SEQ ID NO: 46962 - RNA, 21 nt, RNAi
uuucgacuucgaccucaaccu

SEQ ID NO: 46963 - DNA, 21 bp, homo sapiens
aagctgaagctggagttggag

SEQ ID NO: 46964 - RNA, 21 nt, RNAi
gcugaagcuggaguuggaguu

SEQ ID NO: 46965 - RNA, 21 nt, RNAi
uucgacuucgaccucaaccuc

SEQ ID NO: 46966 - DNA, 21 bp, homo sapiens
aagctggagttggagagccgc

SEQ ID NO: 46967 - RNA, 21 nt, RNAi
gcuggaguuggagagccgcuu

SEQ ID NO: 46968 - RNA, 21 nt, RNAi
uucgaccucaaccucucggcg

SEQ ID NO: 46969 - DNA, 21 bp, homo sapiens
aaaggctttgtgaccaagcag

SEQ ID NO: 46970 - RNA, 21 nt, RNAi
aggcuuugugaccaagcaguu

SEQ ID NO: 46971 - RNA, 21 nt, RNAi
uuuccgaaacacugguucguc

SEQ ID NO: 46972 - DNA, 21 bp, homo sapiens
aaggctttgtgaccaagcaga

SEQ ID NO: 46973 - RNA, 21 nt, RNAi
ggcuuugugaccaagcagauu

SEQ ID NO: 46974 - RNA, 21 nt, RNAi
uuccgaaacacugguucgucu

SEQ ID NO: 46975 - DNA, 21 bp, homo sapiens
aagcagacgacgaagcatgtc

SEQ ID NO: 46976 - RNA, 21 nt, RNAi
gcagacgacgaagcaugucuu

SEQ ID NO: 46977 - RNA, 21 nt, RNAi
uucgucugcugcuucguacag

SEQ ID NO: 46978 - DNA, 21 bp, homo sapiens
aagcatgtccaccaccactac

SEQ ID NO: 46979 - RNA, 21 nt, RNAi
gcauguccaccaccacuacuu

SEQ ID NO: 46980 - RNA, 21 nt, RNAi
uucguacaggugguggugaug

SEQ ID NO: 46981 - DNA, 21 bp, homo sapiens
aagaccaaggaggagatcgag

SEQ ID NO: 46982 - RNA, 21 nt, RNAi
gaccaaggaggagaucgaguu

SEQ ID NO: 46983 - RNA, 21 nt, RNAi
uucugguuccuccucuagcuc

SEQ ID NO: 46984 - DNA, 21 bp, homo sapiens
aaggaggagatcgaggcggag

SEQ ID NO: 46985 - RNA, 21 nt, RNAi
ggaggagaucgaggcggaguu

SEQ ID NO: 46986 - RNA, 21 nt, RNAi
uuccuccucuagcuccgccuc

SEQ ID NO: 46987 - DNA, 21 bp, homo sapiens
aaagccactccaaggctccgg

SEQ ID NO: 46988 - RNA, 21 nt, RNAi
agccacuccaaggcuccgguu

SEQ ID NO: 46989 - RNA, 21 nt, RNAi
uuucggugagguuccgaggcc

SEQ ID NO: 46990 - DNA, 21 bp, homo sapiens
aagccactccaaggctccgga

SEQ ID NO: 46991 - RNA, 21 nt, RNAi
gccacuccaaggcuccggauu

SEQ ID NO: 46992 - RNA, 21 nt, RNAi
uucggugagguuccgaggccu

SEQ ID NO: 46993 - DNA, 21 bp, homo sapiens
aaggagacaggtcgcaggatg

SEQ ID NO: 46994 - RNA, 21 nt, RNAi
ggagacaggucgcaggauguu

SEQ ID NO: 46995 - RNA, 21 nt, RNAi
uuccucuguccagcguccuac

SEQ ID NO: 46996 - DNA, 21 bp, homo sapiens
aacacgctggctcagctggag

SEQ ID NO: 46997 - RNA, 21 nt, RNAi
cacgcuggcucagcuggaguu

SEQ ID NO: 46998 - RNA, 21 nt, RNAi
uugugcgaccgagucgaccuc

SEQ ID NO: 46999 - DNA, 21 bp, homo sapiens
aaagcagcggtgctgtgtggc

SEQ ID NO: 47000 - RNA, 21 nt, RNAi
agcagcggugcuguguggcuu

SEQ ID NO: 47001 - RNA, 21 nt, RNAi
uuucgucgccacgacacaccg

SEQ ID NO: 47002 - DNA, 21 bp, homo sapiens
aatcattcggccactgttcag

SEQ ID NO: 47003 - RNA, 21 nt, RNAi
ucauucggccacuguucaguu

SEQ ID NO: 47004 - RNA, 21 nt, RNAi
uuaguaagccggugacaaguc

SEQ ID NO: 47005 - DNA, 21 bp, homo sapiens
aatccaagcctggctccagaa

SEQ ID NO: 47006 - RNA, 21 nt, RNAi
uccaagccuggcuccagaauu

SEQ ID NO: 47007 - RNA, 21 nt, RNAi
uuagguucggaccgaggucuu

SEQ ID NO: 47008 - DNA, 21 bp, homo sapiens
aagcctggctccagaagatca

SEQ ID NO: 47009 - RNA, 21 nt, RNAi
gccuggcuccagaagaucauu

SEQ ID NO: 47010 - RNA, 21 nt, RNAi
uucggaccgaggucuucuagu

SEQ ID NO: 47011 - DNA, 21 bp, homo sapiens
aagatcacaaagagccaaaga

SEQ ID NO: 47012 - RNA, 21 nt, RNAi
gaucacaaagagccaaagauu

SEQ ID NO: 47013 - RNA, 21 nt, RNAi
uucuaguguuucucgguuucu

SEQ ID NO: 47014 - DNA, 21 bp, homo sapiens
aaagagccaaagaaactggca

SEQ ID NO: 47015 - RNA, 21 nt, RNAi
agagccaaagaaacuggcauu

SEQ ID NO: 47016 - RNA, 21 nt, RNAi
uuucucgguuucuuugaccgu

SEQ ID NO: 47017 - DNA, 21 bp, homo sapiens
aagagccaaagaaactggcag

SEQ ID NO: 47018 - RNA, 21 nt, RNAi
gagccaaagaaacuggcaguu

SEQ ID NO: 47019 - RNA, 21 nt, RNAi
uucucgguuucuuugaccguc

SEQ ID NO: 47020 - DNA, 21 bp, homo sapiens
aaagaaactggcaggtgtcca

SEQ ID NO: 47021 - RNA, 21 nt, RNAi
agaaacuggcagguguccauu

SEQ ID NO: 47022 - RNA, 21 nt, RNAi
uuucuuugaccguccacaggu

SEQ ID NO: 47023 - DNA, 21 bp, homo sapiens
aagaaactggcaggtgtccac

SEQ ID NO: 47024 - RNA, 21 nt, RNAi
gaaacuggcagguguccacuu

SEQ ID NO: 47025 - RNA, 21 nt, RNAi
uucuuugaccguccacaggug

SEQ ID NO: 47026 - DNA, 21 bp, homo sapiens
aaactggcaggtgtccacgcg

SEQ ID NO: 47027 - RNA, 21 nt, RNAi
acuggcagguguccacgcguu

SEQ ID NO: 47028 - RNA, 21 nt, RNAi
uuugaccguccacaggugcgc

SEQ ID NO: 47029 - DNA, 21 bp, homo sapiens
aagaaattccataccggagga

SEQ ID NO: 47030 - RNA, 21 nt, RNAi
gaaauuccauaccggaggauu

SEQ ID NO: 47031 - RNA, 21 nt, RNAi
uucuuuaagguauggccuccu

SEQ ID NO: 47032 - DNA, 21 bp, homo sapiens
aaattccataccggaggatgc

SEQ ID NO: 47033 - RNA, 21 nt, RNAi
auuccauaccggaggaugcuu

SEQ ID NO: 47034 - RNA, 21 nt, RNAi
uuuaagguauggccuccuacg

SEQ ID NO: 47035 - DNA, 21 bp, homo sapiens
aattccataccggaggatgct

SEQ ID NO: 47036 - RNA, 21 nt, RNAi
uuccauaccggaggaugcuuu

SEQ ID NO: 47037 - RNA, 21 nt, RNAi
uuaagguauggccuccuacga

SEQ ID NO: 47038 - DNA, 21 bp, homo sapiens
aaagcaagcgatgagtttgcc

SEQ ID NO: 47039 - RNA, 21 nt, RNAi
agcaagcgaugaguuugccuu

SEQ ID NO: 47040 - RNA, 21 nt, RNAi
uuucguucgcuacucaaacgg

SEQ ID NO: 47041 - DNA, 21 bp, homo sapiens
aagcaagcgatgagtttgcct

SEQ ID NO: 47042 - RNA, 21 nt, RNAi
gcaagcgaugaguuugccuuu

SEQ ID NO: 47043 - RNA, 21 nt, RNAi
uucguucgcuacucaaacgga

SEQ ID NO: 47044 - DNA, 21 bp, homo sapiens
aagcgatgagtttgcctgtgg

SEQ ID NO: 47045 - RNA, 21 nt, RNAi
gcgaugaguuugccugugguu

SEQ ID NO: 47046 - RNA, 21 nt, RNAi
uucgcuacucaaacggacacc

SEQ ID NO: 47047 - DNA, 21 bp, homo sapiens
aaagtggagcggatcgattga

SEQ ID NO: 47048 - RNA, 21 nt, RNAi
aguggagcggaucgauugauu

SEQ ID NO: 47049 - RNA, 21 nt, RNAi
uuucaccucgccuagcuaacu

SEQ ID NO: 47050 - DNA, 21 bp, homo sapiens
aagtggagcggatcgattgag

SEQ ID NO: 47051 - RNA, 21 nt, RNAi
guggagcggaucgauugaguu

SEQ ID NO: 47052 - RNA, 21 nt, RNAi
uucaccucgccuagcuaacuc

SEQ ID NO: 47053 - DNA, 21 bp, homo sapiens
aagctcttgtgaactgtcttg

SEQ ID NO: 47054 - RNA, 21 nt, RNAi
gcucuugugaacugucuuguu

SEQ ID NO: 47055 - RNA, 21 nt, RNAi
uucgagaacacuugacagaac

SEQ ID NO: 47056 - DNA, 21 bp, homo sapiens
aactgtcttggctgtgagcaa

SEQ ID NO: 47057 - RNA, 21 nt, RNAi
cugucuuggcugugagcaauu

SEQ ID NO: 47058 - RNA, 21 nt, RNAi
uugacagaaccgacacucguu

SEQ ID NO: 47059 - DNA, 21 bp, homo sapiens
aaaccaatgaagaagacaaag

SEQ ID NO: 47060 - RNA, 21 nt, RNAi
accaaugaagaagacaaaguu

SEQ ID NO: 47061 - RNA, 21 nt, RNAi
uuugguuacuucuucuguuuc

SEQ ID NO: 47062 - DNA, 21 bp, homo sapiens
aaccaatgaagaagacaaagt

SEQ ID NO: 47063 - RNA, 21 nt, RNAi
ccaaugaagaagacaaaguuu

SEQ ID NO: 47064 - RNA, 21 nt, RNAi
uugguuacuucuucuguuuca

SEQ ID NO: 47065 - DNA, 21 bp, homo sapiens
aagaagacaaagtctaaggaa

SEQ ID NO: 47066 - RNA, 21 nt, RNAi
gaagacaaagucuaaggaauu

SEQ ID NO: 47067 - RNA, 21 nt, RNAi
uucuucuguuucagauuccuu

SEQ ID NO: 47068 - DNA, 21 bp, homo sapiens
aagacaaagtctaaggaagaa

SEQ ID NO: 47069 - RNA, 21 nt, RNAi
gacaaagucuaaggaagaauu

SEQ ID NO: 47070 - RNA, 21 nt, RNAi
uucuguuucagauuccuucuu

SEQ ID NO: 47071 - DNA, 21 bp, homo sapiens
aaagtctaaggaagaatcggc

SEQ ID NO: 47072 - RNA, 21 nt, RNAi
agucuaaggaagaaucggcuu

SEQ ID NO: 47073 - RNA, 21 nt, RNAi
uuucagauuccuucuuagccg

SEQ ID NO: 47074 - DNA, 21 bp, homo sapiens
aagtctaaggaagaatcggcc

SEQ ID NO: 47075 - RNA, 21 nt, RNAi
gucuaaggaagaaucggccuu

SEQ ID NO: 47076 - RNA, 21 nt, RNAi
uucagauuccuucuuagccgg

SEQ ID NO: 47077 - DNA, 21 bp, homo sapiens
aaacatgaccactcttggcta

SEQ ID NO: 47078 - RNA, 21 nt, RNAi
acaugaccacucuuggcuauu

SEQ ID NO: 47079 - RNA, 21 nt, RNAi
uuuguacuggugagaaccgau

SEQ ID NO: 47080 - DNA, 21 bp, homo sapiens
aacatgaccactcttggctat

SEQ ID NO: 47081 - RNA, 21 nt, RNAi
caugaccacucuuggcuauuu

SEQ ID NO: 47082 - RNA, 21 nt, RNAi
uuguacuggugagaaccgaua

SEQ ID NO: 47083 - DNA, 21 bp, homo sapiens
aagatgctgcctgtatttgag

SEQ ID NO: 47084 - RNA, 21 nt, RNAi
gaugcugccuguauuugaguu

SEQ ID NO: 47085 - RNA, 21 nt, RNAi
uucuacgacggacauaaacuc

SEQ ID NO: 47086 - DNA, 21 bp, homo sapiens
aagagaaactgtgtatagctt

SEQ ID NO: 47087 - RNA, 21 nt, RNAi
gagaaacuguguauagcuuuu

SEQ ID NO: 47088 - RNA, 21 nt, RNAi
uucucuuugacacauaucgaa

SEQ ID NO: 47089 - DNA, 21 bp, homo sapiens
aaactgtgtatagcttacctg

SEQ ID NO: 47090 - RNA, 21 nt, RNAi
acuguguauagcuuaccuguu

SEQ ID NO: 47091 - RNA, 21 nt, RNAi
uuugacacauaucgaauggac

SEQ ID NO: 47092 - DNA, 21 bp, homo sapiens
aactgtgtatagcttacctga

SEQ ID NO: 47093 - RNA, 21 nt, RNAi
cuguguauagcuuaccugauu

SEQ ID NO: 47094 - RNA, 21 nt, RNAi
uugacacauaucgaauggacu

SEQ ID NO: 47095 - DNA, 21 bp, homo sapiens
aacaggaatccttactgatat

SEQ ID NO: 47096 - RNA, 21 nt, RNAi
caggaauccuuacugauauuu

SEQ ID NO: 47097 - RNA, 21 nt, RNAi
uuguccuuaggaaugacuaua

SEQ ID NO: 47098 - DNA, 21 bp, homo sapiens
cagagagaccacgccgattgc

SEQ ID NO: 47099 - RNA, 21 nt, RNAi
gagagaccacgccgauugcuu

SEQ ID NO: 47100 - RNA, 21 nt, RNAi
uucucucuggugcggcuaacg

SEQ ID NO: 47101 - DNA, 21 bp, homo sapiens
cacgccgattgctgagaggaa

SEQ ID NO: 47102 - RNA, 21 nt, RNAi
cgccgauugcugagaggaauu

SEQ ID NO: 47103 - RNA, 21 nt, RNAi
uugcggcuaacgacucuccuu

SEQ ID NO: 47104 - DNA, 21 bp, homo sapiens
caccatgagtagcgctatgtt

SEQ ID NO: 47105 - RNA, 21 nt, RNAi
ccaugaguagcgcuauguuuu

SEQ ID NO: 47106 - RNA, 21 nt, RNAi
uugguacucaucgcgauacaa

SEQ ID NO: 47107 - DNA, 21 bp, homo sapiens
catgagtagcgctatgttggt

SEQ ID NO: 47108 - RNA, 21 nt, RNAi
ugaguagcgcuauguugguuu

SEQ ID NO: 47109 - RNA, 21 nt, RNAi
uuacucaucgcgauacaacca

SEQ ID NO: 47110 - DNA, 21 bp, homo sapiens
cagcagcagcttccgtgagga

SEQ ID NO: 47111 - RNA, 21 nt, RNAi
gcagcagcuuccgugaggauu

SEQ ID NO: 47112 - RNA, 21 nt, RNAi
uucgucgucgaaggcacuccu

SEQ ID NO: 47113 - DNA, 21 bp, homo sapiens
cagcagcttccgtgaggatgc

SEQ ID NO: 47114 - RNA, 21 nt, RNAi
gcagcuuccgugaggaugcuu

SEQ ID NO: 47115 - RNA, 21 nt, RNAi
uucgucgaaggcacuccuacg

SEQ ID NO: 47116 - DNA, 21 bp, homo sapiens
catgtctgtctcttccaacac

SEQ ID NO: 47117 - RNA, 21 nt, RNAi
ugucugucucuuccaacacuu

SEQ ID NO: 47118 - RNA, 21 nt, RNAi
uuacagacagagaagguugug

SEQ ID NO: 47119 - DNA, 21 bp, homo sapiens
caacaccaggcggaacgaaga

SEQ ID NO: 47120 - RNA, 21 nt, RNAi
acaccaggcggaacgaagauu

SEQ ID NO: 47121 - RNA, 21 nt, RNAi
uuugugguccgccuugcuucu

SEQ ID NO: 47122 - DNA, 21 bp, homo sapiens
caccaggcggaacgaagatgg

SEQ ID NO: 47123 - RNA, 21 nt, RNAi
ccaggcggaacgaagaugguu

SEQ ID NO: 47124 - RNA, 21 nt, RNAi
uugguccgccuugcuucuacc

SEQ ID NO: 47125 - DNA, 21 bp, homo sapiens
caagtccttacactccttatt

SEQ ID NO: 47126 - RNA, 21 nt, RNAi
aguccuuacacuccuuauuuu

SEQ ID NO: 47127 - RNA, 21 nt, RNAi
uuucaggaaugugaggaauaa

SEQ ID NO: 47128 - DNA, 21 bp, homo sapiens
caagacggtgcttacctgttc

SEQ ID NO: 47129 - RNA, 21 nt, RNAi
agacggugcuuaccuguucuu

SEQ ID NO: 47130 - RNA, 21 nt, RNAi
uuucugccacgaauggacaag

SEQ ID NO: 47131 - DNA, 21 bp, homo sapiens
caatggattcaggcagatgaa

SEQ ID NO: 47132 - RNA, 21 nt, RNAi
auggauucaggcagaugaauu

SEQ ID NO: 47133 - RNA, 21 nt, RNAi
uuuaccuaaguccgucuacuu

SEQ ID NO: 47134 - DNA, 21 bp, homo sapiens
caggcagatgaacctgaagga

SEQ ID NO: 47135 - RNA, 21 nt, RNAi
ggcagaugaaccugaaggauu

SEQ ID NO: 47136 - RNA, 21 nt, RNAi
uuccgucuacuuggacuuccu

SEQ ID NO: 47137 - DNA, 21 bp, homo sapiens
cagatgaacctgaaggatacc

SEQ ID NO: 47138 - RNA, 21 nt, RNAi
gaugaaccugaaggauaccuu

SEQ ID NO: 47139 - RNA, 21 nt, RNAi
uucuacuuggacuuccuaugg

SEQ ID NO: 47140 - DNA, 21 bp, homo sapiens
cattgagaacaacagcattgt

SEQ ID NO: 47141 - RNA, 21 nt, RNAi
uugagaacaacagcauuguuu

SEQ ID NO: 47142 - RNA, 21 nt, RNAi
uuaacucuuguugucguaaca

SEQ ID NO: 47143 - DNA, 21 bp, homo sapiens
caacagcattgtctccaagca

SEQ ID NO: 47144 - RNA, 21 nt, RNAi
acagcauugucuccaagcauu

SEQ ID NO: 47145 - RNA, 21 nt, RNAi
uuugucguaacagagguucgu

SEQ ID NO: 47146 - DNA, 21 bp, homo sapiens
cagcattgtctccaagcagct

SEQ ID NO: 47147 - RNA, 21 nt, RNAi
gcauugucuccaagcagcuuu

SEQ ID NO: 47148 - RNA, 21 nt, RNAi
uucguaacagagguucgucga

SEQ ID NO: 47149 - DNA, 21 bp, homo sapiens
cattgtctccaagcagctgaa

SEQ ID NO: 47150 - RNA, 21 nt, RNAi
uugucuccaagcagcugaauu

SEQ ID NO: 47151 - RNA, 21 nt, RNAi
uuaacagagguucgucgacuu

SEQ ID NO: 47152 - DNA, 21 bp, homo sapiens
caagcagctgaagcctgccac

SEQ ID NO: 47153 - RNA, 21 nt, RNAi
agcagcugaagccugccacuu

SEQ ID NO: 47154 - RNA, 21 nt, RNAi
uuucgucgacuucggacggug

SEQ ID NO: 47155 - DNA, 21 bp, homo sapiens
cagctgaagcctgccaccaag

SEQ ID NO: 47156 - RNA, 21 nt, RNAi
gcugaagccugccaccaaguu

SEQ ID NO: 47157 - RNA, 21 nt, RNAi
uucgacuucggacggugguuc

SEQ ID NO: 47158 - DNA, 21 bp, homo sapiens
caccaagacctacataagaga

SEQ ID NO: 47159 - RNA, 21 nt, RNAi
ccaagaccuacauaagagauu

SEQ ID NO: 47160 - RNA, 21 nt, RNAi
uugguucuggauguauucucu

SEQ ID NO: 47161 - DNA, 21 bp, homo sapiens
caagacctacataagagatgg

SEQ ID NO: 47162 - RNA, 21 nt, RNAi
agaccuacauaagagaugguu

SEQ ID NO: 47163 - RNA, 21 nt, RNAi
uuucuggauguauucucuacc

SEQ ID NO: 47164 - DNA, 21 bp, homo sapiens
cataagagatggcatcaagaa

SEQ ID NO: 47165 - RNA, 21 nt, RNAi
uaagagauggcaucaagaauu

SEQ ID NO: 47166 - RNA, 21 nt, RNAi
uuauucucuaccguaguucuu

SEQ ID NO: 47167 - DNA, 21 bp, homo sapiens
catcaagaagcagcagattga

SEQ ID NO: 47168 - RNA, 21 nt, RNAi
ucaagaagcagcagauugauu

SEQ ID NO: 47169 - RNA, 21 nt, RNAi
uuaguucuucgucgucuaacu

SEQ ID NO: 47170 - DNA, 21 bp, homo sapiens
caagaagcagcagattgattc

SEQ ID NO: 47171 - RNA, 21 nt, RNAi
agaagcagcagauugauucuu

SEQ ID NO: 47172 - RNA, 21 nt, RNAi
uuucuucgucgucuaacuaag

SEQ ID NO: 47173 - DNA, 21 bp, homo sapiens
cagcagattgattccatcatg

SEQ ID NO: 47174 - RNA, 21 nt, RNAi
gcagauugauuccaucauguu

SEQ ID NO: 47175 - RNA, 21 nt, RNAi
uucgucuaacuaagguaguac

SEQ ID NO: 47176 - DNA, 21 bp, homo sapiens
cagattgattccatcatgttt

SEQ ID NO: 47177 - RNA, 21 nt, RNAi
gauugauuccaucauguuuuu

SEQ ID NO: 47178 - RNA, 21 nt, RNAi
uucuaacuaagguaguacaaa

SEQ ID NO: 47179 - DNA, 21 bp, homo sapiens
catcatgtttgaccaggcgca

SEQ ID NO: 47180 - RNA, 21 nt, RNAi
ucauguuugaccaggcgcauu

SEQ ID NO: 47181 - RNA, 21 nt, RNAi
uuaguacaaacugguccgcgu

SEQ ID NO: 47182 - DNA, 21 bp, homo sapiens
catgtttgaccaggcgcagac

SEQ ID NO: 47183 - RNA, 21 nt, RNAi
uguuugaccaggcgcagacuu

SEQ ID NO: 47184 - RNA, 21 nt, RNAi
uuacaaacugguccgcgucug

SEQ ID NO: 47185 - DNA, 21 bp, homo sapiens
cagaccgagatccagtcggtg

SEQ ID NO: 47186 - RNA, 21 nt, RNAi
gaccgagauccagucgguguu

SEQ ID NO: 47187 - RNA, 21 nt, RNAi
uucuggcucuaggucagccac

SEQ ID NO: 47188 - DNA, 21 bp, homo sapiens
cacagcttacatgagtaatgg

SEQ ID NO: 47189 - RNA, 21 nt, RNAi
cagcuuacaugaguaaugguu

SEQ ID NO: 47190 - RNA, 21 nt, RNAi
uugucgaauguacucauuacc

SEQ ID NO: 47191 - DNA, 21 bp, homo sapiens
caccttgaatgaagaagagga

SEQ ID NO: 47192 - RNA, 21 nt, RNAi
ccuugaaugaagaagaggauu

SEQ ID NO: 47193 - RNA, 21 nt, RNAi
uuggaacuuacuucuucuccu

SEQ ID NO: 47194 - DNA, 21 bp, homo sapiens
caagtgcaaactttcgccaac

SEQ ID NO: 47195 - RNA, 21 nt, RNAi
agugcaaacuuucgccaacuu

SEQ ID NO: 47196 - RNA, 21 nt, RNAi
uuucacguuugaaagcgguug

SEQ ID NO: 47197 - DNA, 21 bp, homo sapiens
caaactttcgccaaccgtggt

SEQ ID NO: 47198 - RNA, 21 nt, RNAi
aacuuucgccaaccgugguuu

SEQ ID NO: 47199 - RNA, 21 nt, RNAi
uuuugaaagcgguuggcacca

SEQ ID NO: 47200 - DNA, 21 bp, homo sapiens
caaccgtggttggcttgtcca

SEQ ID NO: 47201 - RNA, 21 nt, RNAi
accgugguuggcuuguccauu

SEQ ID NO: 47202 - RNA, 21 nt, RNAi
uuuggcaccaaccgaacaggu

SEQ ID NO: 47203 - DNA, 21 bp, homo sapiens
cacggaaactgttgacagtgg

SEQ ID NO: 47204 - RNA, 21 nt, RNAi
cggaaacuguugacagugguu

SEQ ID NO: 47205 - RNA, 21 nt, RNAi
uugccuuugacaacugucacc

SEQ ID NO: 47206 - DNA, 21 bp, homo sapiens
cagtggatacaggtccttcaa

SEQ ID NO: 47207 - RNA, 21 nt, RNAi
guggauacagguccuucaauu

SEQ ID NO: 47208 - RNA, 21 nt, RNAi
uucaccuauguccaggaaguu

SEQ ID NO: 47209 - DNA, 21 bp, homo sapiens
caggtccttcaagaggagcga

SEQ ID NO: 47210 - RNA, 21 nt, RNAi
gguccuucaagaggagcgauu

SEQ ID NO: 47211 - RNA, 21 nt, RNAi
uuccaggaaguucuccucgcu

SEQ ID NO: 47212 - DNA, 21 bp, homo sapiens
caagaggagcgatcctgttaa

SEQ ID NO: 47213 - RNA, 21 nt, RNAi
agaggagcgauccuguuaauu

SEQ ID NO: 47214 - RNA, 21 nt, RNAi
uuucuccucgcuaggacaauu

SEQ ID NO: 47215 - DNA, 21 bp, homo sapiens
cacataggttctggctatgtc

SEQ ID NO: 47216 - RNA, 21 nt, RNAi
cauagguucuggcuaugucuu

SEQ ID NO: 47217 - RNA, 21 nt, RNAi
uuguauccaagaccgauacag

SEQ ID NO: 47218 - DNA, 21 bp, homo sapiens
cataggttctggctatgtctt

SEQ ID NO: 47219 - RNA, 21 nt, RNAi
uagguucuggcuaugucuuuu

SEQ ID NO: 47220 - RNA, 21 nt, RNAi
uuauccaagaccgauacagaa

SEQ ID NO: 47221 - DNA, 21 bp, homo sapiens
caccagcgccaacgacagtga

SEQ ID NO: 47222 - RNA, 21 nt, RNAi
ccagcgccaacgacagugauu

SEQ ID NO: 47223 - RNA, 21 nt, RNAi
uuggucgcgguugcugucacu

SEQ ID NO: 47224 - DNA, 21 bp, homo sapiens
cagcgccaacgacagtgagat

SEQ ID NO: 47225 - RNA, 21 nt, RNAi
gcgccaacgacagugagauuu

SEQ ID NO: 47226 - RNA, 21 nt, RNAi
uucgcgguugcugucacucua

SEQ ID NO: 47227 - DNA, 21 bp, homo sapiens
caacgacagtgagatatccag

SEQ ID NO: 47228 - RNA, 21 nt, RNAi
acgacagugagauauccaguu

SEQ ID NO: 47229 - RNA, 21 nt, RNAi
uuugcugucacucuauagguc

SEQ ID NO: 47230 - DNA, 21 bp, homo sapiens
cagtgagatatccagtgatgc

SEQ ID NO: 47231 - RNA, 21 nt, RNAi
gugagauauccagugaugcuu

SEQ ID NO: 47232 - RNA, 21 nt, RNAi
uucacucuauaggucacuacg

SEQ ID NO: 47233 - DNA, 21 bp, homo sapiens
cagtgatgcgctgacggatga

SEQ ID NO: 47234 - RNA, 21 nt, RNAi
gugaugcgcugacggaugauu

SEQ ID NO: 47235 - RNA, 21 nt, RNAi
uucacuacgcgacugccuacu

SEQ ID NO: 47236 - DNA, 21 bp, homo sapiens
catgtccatgacggacagcag

SEQ ID NO: 47237 - RNA, 21 nt, RNAi
uguccaugacggacagcaguu

SEQ ID NO: 47238 - RNA, 21 nt, RNAi
uuacagguacugccugucguc

SEQ ID NO: 47239 - DNA, 21 bp, homo sapiens
catgacggacagcagtgtaga

SEQ ID NO: 47240 - RNA, 21 nt, RNAi
ugacggacagcaguguagauu

SEQ ID NO: 47241 - RNA, 21 nt, RNAi
uuacugccugucgucacaucu

SEQ ID NO: 47242 - DNA, 21 bp, homo sapiens
cagcagtgtagatggaattcc

SEQ ID NO: 47243 - RNA, 21 nt, RNAi
gcaguguagauggaauuccuu

SEQ ID NO: 47244 - RNA, 21 nt, RNAi
uucgucacaucuaccuuaagg

SEQ ID NO: 47245 - DNA, 21 bp, homo sapiens
cagtgtagatggaattcctcc

SEQ ID NO: 47246 - RNA, 21 nt, RNAi
guguagauggaauuccuccuu

SEQ ID NO: 47247 - RNA, 21 nt, RNAi
uucacaucuaccuuaaggagg

SEQ ID NO: 47248 - DNA, 21 bp, homo sapiens
cagtaagaaacagctccagag

SEQ ID NO: 47249 - RNA, 21 nt, RNAi
guaagaaacagcuccagaguu

SEQ ID NO: 47250 - RNA, 21 nt, RNAi
uucauucuuugucgaggucuc

SEQ ID NO: 47251 - DNA, 21 bp, homo sapiens
cagctccagagagaaatgcat

SEQ ID NO: 47252 - RNA, 21 nt, RNAi
gcuccagagagaaaugcauuu

SEQ ID NO: 47253 - RNA, 21 nt, RNAi
uucgaggucucucuuuacgua

SEQ ID NO: 47254 - DNA, 21 bp, homo sapiens
cagagagaaatgcatcgcagt

SEQ ID NO: 47255 - RNA, 21 nt, RNAi
gagagaaaugcaucgcaguuu

SEQ ID NO: 47256 - RNA, 21 nt, RNAi
uucucucuuuacguagcguca

SEQ ID NO: 47257 - DNA, 21 bp, homo sapiens
catcgcagtgtgaaggccaat

SEQ ID NO: 47258 - RNA, 21 nt, RNAi
ucgcagugugaaggccaauuu

SEQ ID NO: 47259 - RNA, 21 nt, RNAi
uuagcgucacacuuccgguua

SEQ ID NO: 47260 - DNA, 21 bp, homo sapiens
cagtgtgaaggccaatggcca

SEQ ID NO: 47261 - RNA, 21 nt, RNAi
gugugaaggccaauggccauu

SEQ ID NO: 47262 - RNA, 21 nt, RNAi
uucacacuuccgguuaccggu

SEQ ID NO: 47263 - DNA, 21 bp, homo sapiens
caatggccaagtgtctctacc

SEQ ID NO: 47264 - RNA, 21 nt, RNAi
auggccaagugucucuaccuu

SEQ ID NO: 47265 - RNA, 21 nt, RNAi
uuuaccgguucacagagaugg

SEQ ID NO: 47266 - DNA, 21 bp, homo sapiens
caagtgtctctacctcatttc

SEQ ID NO: 47267 - RNA, 21 nt, RNAi
agugucucuaccucauuucuu

SEQ ID NO: 47268 - RNA, 21 nt, RNAi
uuucacagagauggaguaaag

SEQ ID NO: 47269 - DNA, 21 bp, homo sapiens
cacctttgcagctgagctgat

SEQ ID NO: 47270 - RNA, 21 nt, RNAi
ccuuugcagcugagcugauuu

SEQ ID NO: 47271 - RNA, 21 nt, RNAi
uuggaaacgucgacucgacua

SEQ ID NO: 47272 - DNA, 21 bp, homo sapiens
cagctgagctgatctcgaggc

SEQ ID NO: 47273 - RNA, 21 nt, RNAi
gcugagcugaucucgaggcuu

SEQ ID NO: 47274 - RNA, 21 nt, RNAi
uucgacucgacuagagcuccg

SEQ ID NO: 47275 - DNA, 21 bp, homo sapiens
cagcagatccgagaggatgaa

SEQ ID NO: 47276 - RNA, 21 nt, RNAi
gcagauccgagaggaugaauu

SEQ ID NO: 47277 - RNA, 21 nt, RNAi
uucgucuaggcucuccuacuu

SEQ ID NO: 47278 - DNA, 21 bp, homo sapiens
cagatccgagaggatgaagag

SEQ ID NO: 47279 - RNA, 21 nt, RNAi
gauccgagaggaugaagaguu

SEQ ID NO: 47280 - RNA, 21 nt, RNAi
uucuaggcucuccuacuucuc

SEQ ID NO: 47281 - DNA, 21 bp, homo sapiens
cagacgatactggacgatcac

SEQ ID NO: 47282 - RNA, 21 nt, RNAi
gacgauacuggacgaucacuu

SEQ ID NO: 47283 - RNA, 21 nt, RNAi
uucugcuaugaccugcuagug

SEQ ID NO: 47284 - DNA, 21 bp, homo sapiens
caccaccaccaccaccattcg

SEQ ID NO: 47285 - RNA, 21 nt, RNAi
ccaccaccaccaccauucguu

SEQ ID NO: 47286 - RNA, 21 nt, RNAi
uugguggugguggugguaagc

SEQ ID NO: 47287 - DNA, 21 bp, homo sapiens
caccaccaccaccattcgcag

SEQ ID NO: 47288 - RNA, 21 nt, RNAi
ccaccaccaccauucgcaguu

SEQ ID NO: 47289 - RNA, 21 nt, RNAi
uuggugguggugguaagcguc

SEQ ID NO: 47290 - DNA, 21 bp, homo sapiens
caccaccaccattcgcagtac

SEQ ID NO: 47291 - RNA, 21 nt, RNAi
ccaccaccauucgcaguacuu

SEQ ID NO: 47292 - RNA, 21 nt, RNAi
uugguggugguaagcgucaug

SEQ ID NO: 47293 - DNA, 21 bp, homo sapiens
caccaccattcgcagtaccac

SEQ ID NO: 47294 - RNA, 21 nt, RNAi
ccaccauucgcaguaccacuu

SEQ ID NO: 47295 - RNA, 21 nt, RNAi
uuggugguaagcgucauggug

SEQ ID NO: 47296 - DNA, 21 bp, homo sapiens
caccattcgcagtaccactcc

SEQ ID NO: 47297 - RNA, 21 nt, RNAi
ccauucgcaguaccacuccuu

SEQ ID NO: 47298 - RNA, 21 nt, RNAi
uugguaagcgucauggugagg

SEQ ID NO: 47299 - DNA, 21 bp, homo sapiens
caaaggctttgtgaccaagca

SEQ ID NO: 47300 - RNA, 21 nt, RNAi
aaggcuuugugaccaagcauu

SEQ ID NO: 47301 - RNA, 21 nt, RNAi
uuuuccgaaacacugguucgu

SEQ ID NO: 47302 - DNA, 21 bp, homo sapiens
caagcagacgacgaagcatgt

SEQ ID NO: 47303 - RNA, 21 nt, RNAi
agcagacgacgaagcauguuu

SEQ ID NO: 47304 - RNA, 21 nt, RNAi
uuucgucugcugcuucguaca

SEQ ID NO: 47305 - DNA, 21 bp, homo sapiens
cagacgacgaagcatgtccac

SEQ ID NO: 47306 - RNA, 21 nt, RNAi
gacgacgaagcauguccacuu

SEQ ID NO: 47307 - RNA, 21 nt, RNAi
uucugcugcuucguacaggug

SEQ ID NO: 47308 - DNA, 21 bp, homo sapiens
catgtccaccaccactacatc

SEQ ID NO: 47309 - RNA, 21 nt, RNAi
uguccaccaccacuacaucuu

SEQ ID NO: 47310 - RNA, 21 nt, RNAi
uuacaggugguggugauguag

SEQ ID NO: 47311 - DNA, 21 bp, homo sapiens
caccaccactacatccaccac

SEQ ID NO: 47312 - RNA, 21 nt, RNAi
ccaccacuacauccaccacuu

SEQ ID NO: 47313 - RNA, 21 nt, RNAi
uugguggugauguagguggug

SEQ ID NO: 47314 - DNA, 21 bp, homo sapiens
caccactacatccaccaccat

SEQ ID NO: 47315 - RNA, 21 nt, RNAi
ccacuacauccaccaccauuu

SEQ ID NO: 47316 - RNA, 21 nt, RNAi
uuggugauguaggugguggua

SEQ ID NO: 47317 - DNA, 21 bp, homo sapiens
cactacatccaccaccatgcc

SEQ ID NO: 47318 - RNA, 21 nt, RNAi
cuacauccaccaccaugccuu

SEQ ID NO: 47319 - RNA, 21 nt, RNAi
uugauguagguggugguacgg

SEQ ID NO: 47320 - DNA, 21 bp, homo sapiens
caagaccaaggaggagatcga

SEQ ID NO: 47321 - RNA, 21 nt, RNAi
agaccaaggaggagaucgauu

SEQ ID NO: 47322 - RNA, 21 nt, RNAi
uuucugguuccuccucuagcu

SEQ ID NO: 47323 - DNA, 21 bp, homo sapiens
caaggaggagatcgaggcgga

SEQ ID NO: 47324 - RNA, 21 nt, RNAi
aggaggagaucgaggcggauu

SEQ ID NO: 47325 - RNA, 21 nt, RNAi
uuuccuccucuagcuccgccu

SEQ ID NO: 47326 - DNA, 21 bp, homo sapiens
cagcgagtattactgctactc

SEQ ID NO: 47327 - RNA, 21 nt, RNAi
gcgaguauuacugcuacucuu

SEQ ID NO: 47328 - RNA, 21 nt, RNAi
uucgcucauaaugacgaugag

SEQ ID NO: 47329 - DNA, 21 bp, homo sapiens
cactccaaggctccggaaacc

SEQ ID NO: 47330 - RNA, 21 nt, RNAi
cuccaaggcuccggaaaccuu

SEQ ID NO: 47331 - RNA, 21 nt, RNAi
uugagguuccgaggccuuugg

SEQ ID NO: 47332 - DNA, 21 bp, homo sapiens
caaggctccggaaaccatgcc

SEQ ID NO: 47333 - RNA, 21 nt, RNAi
aggcuccggaaaccaugccuu

SEQ ID NO: 47334 - RNA, 21 nt, RNAi
uuuccgaggccuuugguacgg

SEQ ID NO: 47335 - DNA, 21 bp, homo sapiens
cagcagaggcagtaccttgcc

SEQ ID NO: 47336 - RNA, 21 nt, RNAi
gcagaggcaguaccuugccuu

SEQ ID NO: 47337 - RNA, 21 nt, RNAi
uucgucuccgucauggaacgg

SEQ ID NO: 47338 - DNA, 21 bp, homo sapiens
caggtcgcaggatgtctggca

SEQ ID NO: 47339 - RNA, 21 nt, RNAi
ggucgcaggaugucuggcauu

SEQ ID NO: 47340 - RNA, 21 nt, RNAi
uuccagcguccuacagaccgu

SEQ ID NO: 47341 - DNA, 21 bp, homo sapiens
caggatgtctggcagtggatg

SEQ ID NO: 47342 - RNA, 21 nt, RNAi
ggaugucuggcaguggauguu

SEQ ID NO: 47343 - RNA, 21 nt, RNAi
uuccuacagaccgucaccuac

SEQ ID NO: 47344 - DNA, 21 bp, homo sapiens
cagtggatgctggagagtgag

SEQ ID NO: 47345 - RNA, 21 nt, RNAi
guggaugcuggagagugaguu

SEQ ID NO: 47346 - RNA, 21 nt, RNAi
uucaccuacgaccucucacuc

SEQ ID NO: 47347 - DNA, 21 bp, homo sapiens
caacacgctggctcagctgga

SEQ ID NO: 47348 - RNA, 21 nt, RNAi
acacgcuggcucagcuggauu

SEQ ID NO: 47349 - RNA, 21 nt, RNAi
uuugugcgaccgagucgaccu

SEQ ID NO: 47350 - DNA, 21 bp, homo sapiens
caggctagctgaggtgtcgaa

SEQ ID NO: 47351 - RNA, 21 nt, RNAi
ggcuagcugaggugucgaauu

SEQ ID NO: 47352 - RNA, 21 nt, RNAi
uuccgaucgacuccacagcuu

SEQ ID NO: 47353 - DNA, 21 bp, homo sapiens
caaagcagcggtgctgtgtgg

SEQ ID NO: 47354 - RNA, 21 nt, RNAi
aagcagcggugcugugugguu

SEQ ID NO: 47355 - RNA, 21 nt, RNAi
uuuucgucgccacgacacacc

SEQ ID NO: 47356 - DNA, 21 bp, homo sapiens
caggaatcattcggccactgt

SEQ ID NO: 47357 - RNA, 21 nt, RNAi
ggaaucauucggccacuguuu

SEQ ID NO: 47358 - RNA, 21 nt, RNAi
uuccuuaguaagccggugaca

SEQ ID NO: 47359 - DNA, 21 bp, homo sapiens
cattcggccactgttcagacg

SEQ ID NO: 47360 - RNA, 21 nt, RNAi
uucggccacuguucagacguu

SEQ ID NO: 47361 - RNA, 21 nt, RNAi
uuaagccggugacaagucugc

SEQ ID NO: 47362 - DNA, 21 bp, homo sapiens
caatccaagcctggctccaga

SEQ ID NO: 47363 - RNA, 21 nt, RNAi
auccaagccuggcuccagauu

SEQ ID NO: 47364 - RNA, 21 nt, RNAi
uuuagguucggaccgaggucu

SEQ ID NO: 47365 - DNA, 21 bp, homo sapiens
caagcctggctccagaagatc

SEQ ID NO: 47366 - RNA, 21 nt, RNAi
agccuggcuccagaagaucuu

SEQ ID NO: 47367 - RNA, 21 nt, RNAi
uuucggaccgaggucuucuag

SEQ ID NO: 47368 - DNA, 21 bp, homo sapiens
cagaagatcacaaagagccaa

SEQ ID NO: 47369 - RNA, 21 nt, RNAi
gaagaucacaaagagccaauu

SEQ ID NO: 47370 - RNA, 21 nt, RNAi
uucuucuaguguuucucgguu

SEQ ID NO: 47371 - DNA, 21 bp, homo sapiens
cacaaagagccaaagaaactg

SEQ ID NO: 47372 - RNA, 21 nt, RNAi
caaagagccaaagaaacuguu

SEQ ID NO: 47373 - RNA, 21 nt, RNAi
uuguuucucgguuucuuugac

SEQ ID NO: 47374 - DNA, 21 bp, homo sapiens
caaagagccaaagaaactggc

SEQ ID NO: 47375 - RNA, 21 nt, RNAi
aagagccaaagaaacuggcuu

SEQ ID NO: 47376 - RNA, 21 nt, RNAi
uuuucucgguuucuuugaccg

SEQ ID NO: 47377 - DNA, 21 bp, homo sapiens
caaagaaactggcaggtgtcc

SEQ ID NO: 47378 - RNA, 21 nt, RNAi
aagaaacuggcagguguccuu

SEQ ID NO: 47379 - RNA, 21 nt, RNAi
uuuucuuugaccguccacagg

SEQ ID NO: 47380 - DNA, 21 bp, homo sapiens
caggccagtgagttggttgtc

SEQ ID NO: 47381 - RNA, 21 nt, RNAi
ggccagugaguugguugucuu

SEQ ID NO: 47382 - RNA, 21 nt, RNAi
uuccggucacucaaccaacag

SEQ ID NO: 47383 - DNA, 21 bp, homo sapiens
cagtgagttggttgtcactta

SEQ ID NO: 47384 - RNA, 21 nt, RNAi
gugaguugguugucacuuauu

SEQ ID NO: 47385 - RNA, 21 nt, RNAi
uucacucaaccaacagugaau

SEQ ID NO: 47386 - DNA, 21 bp, homo sapiens
cataccggaggatgctgaagg

SEQ ID NO: 47387 - RNA, 21 nt, RNAi
uaccggaggaugcugaagguu

SEQ ID NO: 47388 - RNA, 21 nt, RNAi
uuauggccuccuacgacuucc

SEQ ID NO: 47389 - DNA, 21 bp, homo sapiens
cactttaaagagcagctcagc

SEQ ID NO: 47390 - RNA, 21 nt, RNAi
cuuuaaagagcagcucagcuu

SEQ ID NO: 47391 - RNA, 21 nt, RNAi
uugaaauuucucgucgagucg

SEQ ID NO: 47392 - DNA, 21 bp, homo sapiens
caagcgatgagtttgcctgtg

SEQ ID NO: 47393 - RNA, 21 nt, RNAi
agcgaugaguuugccuguguu

SEQ ID NO: 47394 - RNA, 21 nt, RNAi
uuucgcuacucaaacggacac

SEQ ID NO: 47395 - DNA, 21 bp, homo sapiens
caaagtggagcggatcgattg

SEQ ID NO: 47396 - RNA, 21 nt, RNAi
aaguggagcggaucgauuguu

SEQ ID NO: 47397 - RNA, 21 nt, RNAi
uuuucaccucgccuagcuaac

SEQ ID NO: 47398 - DNA, 21 bp, homo sapiens
caatgaagaagacaaagtcta

SEQ ID NO: 47399 - RNA, 21 nt, RNAi
augaagaagacaaagucuauu

SEQ ID NO: 47400 - RNA, 21 nt, RNAi
uuuacuucuucuguuucagau

SEQ ID NO: 47401 - DNA, 21 bp, homo sapiens
caaagtctaaggaagaatcgg

SEQ ID NO: 47402 - RNA, 21 nt, RNAi
aagucuaaggaagaaucgguu

SEQ ID NO: 47403 - RNA, 21 nt, RNAi
uuuucagauuccuucuuagcc

SEQ ID NO: 47404 - DNA, 21 bp, homo sapiens
catgaccactcttggctattg

SEQ ID NO: 47405 - RNA, 21 nt, RNAi
ugaccacucuuggcuauuguu

SEQ ID NO: 47406 - RNA, 21 nt, RNAi
uuacuggugagaaccgauaac

SEQ ID NO: 47407 - DNA, 21 bp, homo sapiens
cactcttggctattgaagatg

SEQ ID NO: 47408 - RNA, 21 nt, RNAi
cucuuggcuauugaagauguu

SEQ ID NO: 47409 - RNA, 21 nt, RNAi
uugagaaccgauaacuucuac

SEQ ID NO: 47410 - DNA, 21 bp, homo sapiens
cataatatatgacttcctagg

SEQ ID NO: 47411 - RNA, 21 nt, RNAi
uaauauaugacuuccuagguu

SEQ ID NO: 47412 - RNA, 21 nt, RNAi
uuauuauauacugaaggaucc

SEQ ID NO: 47413 - DNA, 21 bp, homo sapiens
cataaactaagagaaactgtg

SEQ ID NO: 47414 - RNA, 21 nt, RNAi
uaaacuaagagaaacuguguu

SEQ ID NO: 47415 - RNA, 21 nt, RNAi
uuauuugauucucuuugacac

SEQ ID NO: 47416 - DNA, 21 bp, homo sapiens
caggaatccttactgatattt

SEQ ID NO: 47417 - RNA, 21 nt, RNAi
ggaauccuuacugauauuuuu

SEQ ID NO: 47418 - RNA, 21 nt, RNAi
uuccuuaggaaugacuauaaa

SEQ ID NO: 47419 - DNA, 21 bp, homo sapiens
cagtttatggatatgctgctt

SEQ ID NO: 47420 - RNA, 21 nt, RNAi
guuuauggauaugcugcuuuu

SEQ ID NO: 47421 - RNA, 21 nt, RNAi
uucaaauaccuauacgacgaa

SEQ ID NO: 47422 - DNA, 21 bp, homo sapiens
gagagagacagagagaccacg

SEQ ID NO: 47423 - RNA, 21 nt, RNAi
gagagacagagagaccacguu

SEQ ID NO: 47424 - RNA, 21 nt, RNAi
uucucucugucucucuggugc

SEQ ID NO: 47425 - DNA, 21 bp, homo sapiens
gagagacagagagaccacgcc

SEQ ID NO: 47426 - RNA, 21 nt, RNAi
gagacagagagaccacgccuu

SEQ ID NO: 47427 - RNA, 21 nt, RNAi
uucucugucucucuggugcgg

SEQ ID NO: 47428 - DNA, 21 bp, homo sapiens
gagacagagagaccacgccga

SEQ ID NO: 47429 - RNA, 21 nt, RNAi
gacagagagaccacgccgauu

SEQ ID NO: 47430 - RNA, 21 nt, RNAi
uucugucucucuggugcggcu

SEQ ID NO: 47431 - DNA, 21 bp, homo sapiens
gacagagagaccacgccgatt

SEQ ID NO: 47432 - RNA, 21 nt, RNAi
cagagagaccacgccgauuuu

SEQ ID NO: 47433 - RNA, 21 nt, RNAi
uugucucucuggugcggcuaa

SEQ ID NO: 47434 - DNA, 21 bp, homo sapiens
gagagaccacgccgattgctg

SEQ ID NO: 47435 - RNA, 21 nt, RNAi
gagaccacgccgauugcuguu

SEQ ID NO: 47436 - RNA, 21 nt, RNAi
uucucuggugcggcuaacgac

SEQ ID NO: 47437 - DNA, 21 bp, homo sapiens
gagaccacgccgattgctgag

SEQ ID NO: 47438 - RNA, 21 nt, RNAi
gaccacgccgauugcugaguu

SEQ ID NO: 47439 - RNA, 21 nt, RNAi
uucuggugcggcuaacgacuc

SEQ ID NO: 47440 - DNA, 21 bp, homo sapiens
gaccacgccgattgctgagag

SEQ ID NO: 47441 - RNA, 21 nt, RNAi
ccacgccgauugcugagaguu

SEQ ID NO: 47442 - RNA, 21 nt, RNAi
uuggugcggcuaacgacucuc

SEQ ID NO: 47443 - DNA, 21 bp, homo sapiens
gattgctgagaggaactggaa

SEQ ID NO: 47444 - RNA, 21 nt, RNAi
uugcugagaggaacuggaauu

SEQ ID NO: 47445 - RNA, 21 nt, RNAi
uuaacgacucuccuugaccuu

SEQ ID NO: 47446 - DNA, 21 bp, homo sapiens
gagaggaactggaagaagaaa

SEQ ID NO: 47447 - RNA, 21 nt, RNAi
gaggaacuggaagaagaaauu

SEQ ID NO: 47448 - RNA, 21 nt, RNAi
uucuccuugaccuucuucuuu

SEQ ID NO: 47449 - DNA, 21 bp, homo sapiens
gagtagcgctatgttggtgac

SEQ ID NO: 47450 - RNA, 21 nt, RNAi
guagcgcuauguuggugacuu

SEQ ID NO: 47451 - RNA, 21 nt, RNAi
uucaucgcgauacaaccacug

SEQ ID NO: 47452 - DNA, 21 bp, homo sapiens
gaccaagtccttacactcctt

SEQ ID NO: 47453 - RNA, 21 nt, RNAi
ccaaguccuuacacuccuuuu

SEQ ID NO: 47454 - RNA, 21 nt, RNAi
uugguucaggaaugugaggaa

SEQ ID NO: 47455 - DNA, 21 bp, homo sapiens
gatcaagacggtgcttacctg

SEQ ID NO: 47456 - RNA, 21 nt, RNAi
ucaagacggugcuuaccuguu

SEQ ID NO: 47457 - RNA, 21 nt, RNAi
uuaguucugccacgaauggac

SEQ ID NO: 47458 - DNA, 21 bp, homo sapiens
gacggtgcttacctgttccga

SEQ ID NO: 47459 - RNA, 21 nt, RNAi
cggugcuuaccuguuccgauu

SEQ ID NO: 47460 - RNA, 21 nt, RNAi
uugccacgaauggacaaggcu

SEQ ID NO: 47461 - DNA, 21 bp, homo sapiens
gagaaatgcgtggatacctta

SEQ ID NO: 47462 - RNA, 21 nt, RNAi
gaaaugcguggauaccuuauu

SEQ ID NO: 47463 - RNA, 21 nt, RNAi
uucuuuacgcaccuauggaau

SEQ ID NO: 47464 - DNA, 21 bp, homo sapiens
gaaatgcgtggataccttaga

SEQ ID NO: 47465 - RNA, 21 nt, RNAi
aaugcguggauaccuuagauu

SEQ ID NO: 47466 - RNA, 21 nt, RNAi
uuuuacgcaccuauggaaucu

SEQ ID NO: 47467 - DNA, 21 bp, homo sapiens
gataccttagacttctggttt

SEQ ID NO: 47468 - RNA, 21 nt, RNAi
uaccuuagacuucugguuuuu

SEQ ID NO: 47469 - RNA, 21 nt, RNAi
uuauggaaucugaagaccaaa

SEQ ID NO: 47470 - DNA, 21 bp, homo sapiens
gacttctggtttgcctgcaat

SEQ ID NO: 47471 - RNA, 21 nt, RNAi
cuucugguuugccugcaauuu

SEQ ID NO: 47472 - RNA, 21 nt, RNAi
uugaagaccaaacggacguua

SEQ ID NO: 47473 - DNA, 21 bp, homo sapiens
gattcaggcagatgaacctga

SEQ ID NO: 47474 - RNA, 21 nt, RNAi
uucaggcagaugaaccugauu

SEQ ID NO: 47475 - RNA, 21 nt, RNAi
uuaaguccgucuacuuggacu

SEQ ID NO: 47476 - DNA, 21 bp, homo sapiens
gatgaacctgaaggataccaa

SEQ ID NO: 47477 - RNA, 21 nt, RNAi
ugaaccugaaggauaccaauu

SEQ ID NO: 47478 - RNA, 21 nt, RNAi
uuacuuggacuuccuaugguu

SEQ ID NO: 47479 - DNA, 21 bp, homo sapiens
gagtagccaaagcgatctaca

SEQ ID NO: 47480 - RNA, 21 nt, RNAi
guagccaaagcgaucuacauu

SEQ ID NO: 47481 - RNA, 21 nt, RNAi
uucaucgguuucgcuagaugu

SEQ ID NO: 47482 - DNA, 21 bp, homo sapiens
gagaacaacagcattgtctcc

SEQ ID NO: 47483 - RNA, 21 nt, RNAi
gaacaacagcauugucuccuu

SEQ ID NO: 47484 - RNA, 21 nt, RNAi
uucuuguugucguaacagagg

SEQ ID NO: 47485 - DNA, 21 bp, homo sapiens
gaacaacagcattgtctccaa

SEQ ID NO: 47486 - RNA, 21 nt, RNAi
acaacagcauugucuccaauu

SEQ ID NO: 47487 - RNA, 21 nt, RNAi
uuuguugucguaacagagguu

SEQ ID NO: 47488 - DNA, 21 bp, homo sapiens
gaagcctgccaccaagaccta

SEQ ID NO: 47489 - RNA, 21 nt, RNAi
agccugccaccaagaccuauu

SEQ ID NO: 47490 - RNA, 21 nt, RNAi
uuucggacggugguucuggau

SEQ ID NO: 47491 - DNA, 21 bp, homo sapiens
gacctacataagagatggcat

SEQ ID NO: 47492 - RNA, 21 nt, RNAi
ccuacauaagagauggcauuu

SEQ ID NO: 47493 - RNA, 21 nt, RNAi
uuggauguauucucuaccgua

SEQ ID NO: 47494 - DNA, 21 bp, homo sapiens
gagatggcatcaagaagcagc

SEQ ID NO: 47495 - RNA, 21 nt, RNAi
gauggcaucaagaagcagcuu

SEQ ID NO: 47496 - RNA, 21 nt, RNAi
uucuaccguaguucuucgucg

SEQ ID NO: 47497 - DNA, 21 bp, homo sapiens
gatggcatcaagaagcagcag

SEQ ID NO: 47498 - RNA, 21 nt, RNAi
uggcaucaagaagcagcaguu

SEQ ID NO: 47499 - RNA, 21 nt, RNAi
uuaccguaguucuucgucguc

SEQ ID NO: 47500 - DNA, 21 bp, homo sapiens
gaagcagcagattgattccat

SEQ ID NO: 47501 - RNA, 21 nt, RNAi
agcagcagauugauuccauuu

SEQ ID NO: 47502 - RNA, 21 nt, RNAi
uuucgucgucuaacuaaggua

SEQ ID NO: 47503 - DNA, 21 bp, homo sapiens
gattgattccatcatgtttga

SEQ ID NO: 47504 - RNA, 21 nt, RNAi
uugauuccaucauguuugauu

SEQ ID NO: 47505 - RNA, 21 nt, RNAi
uuaacuaagguaguacaaacu

SEQ ID NO: 47506 - DNA, 21 bp, homo sapiens
gattccatcatgtttgaccag

SEQ ID NO: 47507 - RNA, 21 nt, RNAi
uuccaucauguuugaccaguu

SEQ ID NO: 47508 - RNA, 21 nt, RNAi
uuaagguaguacaaacugguc

SEQ ID NO: 47509 - DNA, 21 bp, homo sapiens
gaccgagatccagtcggtgat

SEQ ID NO: 47510 - RNA, 21 nt, RNAi
ccgagauccagucggugauuu

SEQ ID NO: 47511 - RNA, 21 nt, RNAi
uuggcucuaggucagccacua

SEQ ID NO: 47512 - DNA, 21 bp, homo sapiens
gagatccagtcggtgatggag

SEQ ID NO: 47513 - RNA, 21 nt, RNAi
gauccagucggugauggaguu

SEQ ID NO: 47514 - RNA, 21 nt, RNAi
uucuaggucagccacuaccuc

SEQ ID NO: 47515 - DNA, 21 bp, homo sapiens
gatccagtcggtgatggagga

SEQ ID NO: 47516 - RNA, 21 nt, RNAi
uccagucggugauggaggauu

SEQ ID NO: 47517 - RNA, 21 nt, RNAi
uuaggucagccacuaccuccu

SEQ ID NO: 47518 - DNA, 21 bp, homo sapiens
gacttctgatatatacctcga

SEQ ID NO: 47519 - RNA, 21 nt, RNAi
cuucugauauauaccucgauu

SEQ ID NO: 47520 - RNA, 21 nt, RNAi
uugaagacuauauauggagcu

SEQ ID NO: 47521 - DNA, 21 bp, homo sapiens
gatatatacctcgaatatgtg

SEQ ID NO: 47522 - RNA, 21 nt, RNAi
uauauaccucgaauauguguu

SEQ ID NO: 47523 - RNA, 21 nt, RNAi
uuauauauggagcuuauacac

SEQ ID NO: 47524 - DNA, 21 bp, homo sapiens
gagcctaaaggtcgtgtgtgg

SEQ ID NO: 47525 - RNA, 21 nt, RNAi
gccuaaaggucgugugugguu

SEQ ID NO: 47526 - RNA, 21 nt, RNAi
uucggauuuccagcacacacc

SEQ ID NO: 47527 - DNA, 21 bp, homo sapiens
gaatgaagaagaggagtggac

SEQ ID NO: 47528 - RNA, 21 nt, RNAi
augaagaagaggaguggacuu

SEQ ID NO: 47529 - RNA, 21 nt, RNAi
uuuacuucuucuccucaccug

SEQ ID NO: 47530 - DNA, 21 bp, homo sapiens
gaagaagaggagtggacttgt

SEQ ID NO: 47531 - RNA, 21 nt, RNAi
agaagaggaguggacuuguuu

SEQ ID NO: 47532 - RNA, 21 nt, RNAi
uuucuucuccucaccugaaca

SEQ ID NO: 47533 - DNA, 21 bp, homo sapiens
gaagaggagtggacttgtgcc

SEQ ID NO: 47534 - RNA, 21 nt, RNAi
agaggaguggacuugugccuu

SEQ ID NO: 47535 - RNA, 21 nt, RNAi
uuucuccucaccugaacacgg

SEQ ID NO: 47536 - DNA, 21 bp, homo sapiens
gaggagtggacttgtgccgac

SEQ ID NO: 47537 - RNA, 21 nt, RNAi
ggaguggacuugugccgacuu

SEQ ID NO: 47538 - RNA, 21 nt, RNAi
uuccucaccugaacacggcug

SEQ ID NO: 47539 - DNA, 21 bp, homo sapiens
gagtggacttgtgccgacttc

SEQ ID NO: 47540 - RNA, 21 nt, RNAi
guggacuugugccgacuucuu

SEQ ID NO: 47541 - RNA, 21 nt, RNAi
uucaccugaacacggcugaag

SEQ ID NO: 47542 - DNA, 21 bp, homo sapiens
gacttgtgccgacttcaagtg

SEQ ID NO: 47543 - RNA, 21 nt, RNAi
cuugugccgacuucaaguguu

SEQ ID NO: 47544 - RNA, 21 nt, RNAi
uugaacacggcugaaguucac

SEQ ID NO: 47545 - DNA, 21 bp, homo sapiens
gacttcaagtgcaaactttcg

SEQ ID NO: 47546 - RNA, 21 nt, RNAi
cuucaagugcaaacuuucguu

SEQ ID NO: 47547 - RNA, 21 nt, RNAi
uugaaguucacguuugaaagc

SEQ ID NO: 47548 - DNA, 21 bp, homo sapiens
gagtgtgaggtccacggaaac

SEQ ID NO: 47549 - RNA, 21 nt, RNAi
gugugagguccacggaaacuu

SEQ ID NO: 47550 - RNA, 21 nt, RNAi
uucacacuccaggugccuuug

SEQ ID NO: 47551 - DNA, 21 bp, homo sapiens
gaggtccacggaaactgttga

SEQ ID NO: 47552 - RNA, 21 nt, RNAi
gguccacggaaacuguugauu

SEQ ID NO: 47553 - RNA, 21 nt, RNAi
uuccaggugccuuugacaacu

SEQ ID NO: 47554 - DNA, 21 bp, homo sapiens
gaaactgttgacagtggatac

SEQ ID NO: 47555 - RNA, 21 nt, RNAi
aacuguugacaguggauacuu

SEQ ID NO: 47556 - RNA, 21 nt, RNAi
uuuugacaacugucaccuaug

SEQ ID NO: 47557 - DNA, 21 bp, homo sapiens
gacagtggatacaggtccttc

SEQ ID NO: 47558 - RNA, 21 nt, RNAi
caguggauacagguccuucuu

SEQ ID NO: 47559 - RNA, 21 nt, RNAi
uugucaccuauguccaggaag

SEQ ID NO: 47560 - DNA, 21 bp, homo sapiens
gatacaggtccttcaagagga

SEQ ID NO: 47561 - RNA, 21 nt, RNAi
uacagguccuucaagaggauu

SEQ ID NO: 47562 - RNA, 21 nt, RNAi
uuauguccaggaaguucuccu

SEQ ID NO: 47563 - DNA, 21 bp, homo sapiens
gaggagcgatcctgttaatcc

SEQ ID NO: 47564 - RNA, 21 nt, RNAi
ggagcgauccuguuaauccuu

SEQ ID NO: 47565 - RNA, 21 nt, RNAi
uuccucgcuaggacaauuagg

SEQ ID NO: 47566 - DNA, 21 bp, homo sapiens
gagcgatcctgttaatcctta

SEQ ID NO: 47567 - RNA, 21 nt, RNAi
gcgauccuguuaauccuuauu

SEQ ID NO: 47568 - RNA, 21 nt, RNAi
uucgcuaggacaauuaggaau

SEQ ID NO: 47569 - DNA, 21 bp, homo sapiens
gatcctgttaatccttatcac

SEQ ID NO: 47570 - RNA, 21 nt, RNAi
uccuguuaauccuuaucacuu

SEQ ID NO: 47571 - RNA, 21 nt, RNAi
uuaggacaauuaggaauagug

SEQ ID NO: 47572 - DNA, 21 bp, homo sapiens
gacagtgagatatccagtgat

SEQ ID NO: 47573 - RNA, 21 nt, RNAi
cagugagauauccagugauuu

SEQ ID NO: 47574 - RNA, 21 nt, RNAi
uugucacucuauaggucacua

SEQ ID NO: 47575 - DNA, 21 bp, homo sapiens
gagatatccagtgatgcgctg

SEQ ID NO: 47576 - RNA, 21 nt, RNAi
gauauccagugaugcgcuguu

SEQ ID NO: 47577 - RNA, 21 nt, RNAi
uucuauaggucacuacgcgac

SEQ ID NO: 47578 - DNA, 21 bp, homo sapiens
gatatccagtgatgcgctgac

SEQ ID NO: 47579 - RNA, 21 nt, RNAi
uauccagugaugcgcugacuu

SEQ ID NO: 47580 - RNA, 21 nt, RNAi
uuauaggucacuacgcgacug

SEQ ID NO: 47581 - DNA, 21 bp, homo sapiens
gatgcgctgacggatgattcc

SEQ ID NO: 47582 - RNA, 21 nt, RNAi
ugcgcugacggaugauuccuu

SEQ ID NO: 47583 - RNA, 21 nt, RNAi
uuacgcgacugccuacuaagg

SEQ ID NO: 47584 - DNA, 21 bp, homo sapiens
gacggatgattccatgtccat

SEQ ID NO: 47585 - RNA, 21 nt, RNAi
cggaugauuccauguccauuu

SEQ ID NO: 47586 - RNA, 21 nt, RNAi
uugccuacuaagguacaggua

SEQ ID NO: 47587 - DNA, 21 bp, homo sapiens
gatgattccatgtccatgacg

SEQ ID NO: 47588 - RNA, 21 nt, RNAi
ugauuccauguccaugacguu

SEQ ID NO: 47589 - RNA, 21 nt, RNAi
uuacuaagguacagguacugc

SEQ ID NO: 47590 - DNA, 21 bp, homo sapiens
gattccatgtccatgacggac

SEQ ID NO: 47591 - RNA, 21 nt, RNAi
uuccauguccaugacggacuu

SEQ ID NO: 47592 - RNA, 21 nt, RNAi
uuaagguacagguacugccug

SEQ ID NO: 47593 - DNA, 21 bp, homo sapiens
gacggacagcagtgtagatgg

SEQ ID NO: 47594 - RNA, 21 nt, RNAi
cggacagcaguguagaugguu

SEQ ID NO: 47595 - RNA, 21 nt, RNAi
uugccugucgucacaucuacc

SEQ ID NO: 47596 - DNA, 21 bp, homo sapiens
gacagcagtgtagatggaatt

SEQ ID NO: 47597 - RNA, 21 nt, RNAi
cagcaguguagauggaauuuu

SEQ ID NO: 47598 - RNA, 21 nt, RNAi
uugucgucacaucuaccuuaa

SEQ ID NO: 47599 - DNA, 21 bp, homo sapiens
gatggaattcctccttatcgt

SEQ ID NO: 47600 - RNA, 21 nt, RNAi
uggaauuccuccuuaucguuu

SEQ ID NO: 47601 - RNA, 21 nt, RNAi
uuaccuuaaggaggaauagca

SEQ ID NO: 47602 - DNA, 21 bp, homo sapiens
gaattcctccttatcgtgtgg

SEQ ID NO: 47603 - RNA, 21 nt, RNAi
auuccuccuuaucgugugguu

SEQ ID NO: 47604 - RNA, 21 nt, RNAi
uuuaaggaggaauagcacacc

SEQ ID NO: 47605 - DNA, 21 bp, homo sapiens
gaaacagctccagagagaaat

SEQ ID NO: 47606 - RNA, 21 nt, RNAi
aacagcuccagagagaaauuu

SEQ ID NO: 47607 - RNA, 21 nt, RNAi
uuuugucgaggucucucuuua

SEQ ID NO: 47608 - DNA, 21 bp, homo sapiens
gagagaaatgcatcgcagtgt

SEQ ID NO: 47609 - RNA, 21 nt, RNAi
gagaaaugcaucgcaguguuu

SEQ ID NO: 47610 - RNA, 21 nt, RNAi
uucucuuuacguagcgucaca

SEQ ID NO: 47611 - DNA, 21 bp, homo sapiens
gagaaatgcatcgcagtgtga

SEQ ID NO: 47612 - RNA, 21 nt, RNAi
gaaaugcaucgcagugugauu

SEQ ID NO: 47613 - RNA, 21 nt, RNAi
uucuuuacguagcgucacacu

SEQ ID NO: 47614 - DNA, 21 bp, homo sapiens
gaaatgcatcgcagtgtgaag

SEQ ID NO: 47615 - RNA, 21 nt, RNAi
aaugcaucgcagugugaaguu

SEQ ID NO: 47616 - RNA, 21 nt, RNAi
uuuuacguagcgucacacuuc

SEQ ID NO: 47617 - DNA, 21 bp, homo sapiens
gaaggccaatggccaagtgtc

SEQ ID NO: 47618 - RNA, 21 nt, RNAi
aggccaauggccaagugucuu

SEQ ID NO: 47619 - RNA, 21 nt, RNAi
uuuccgguuaccgguucacag

SEQ ID NO: 47620 - DNA, 21 bp, homo sapiens
gagctgatctcgaggctggaa

SEQ ID NO: 47621 - RNA, 21 nt, RNAi
gcugaucucgaggcuggaauu

SEQ ID NO: 47622 - RNA, 21 nt, RNAi
uucgacuagagcuccgaccuu

SEQ ID NO: 47623 - DNA, 21 bp, homo sapiens
gaagctggagttggagagccg

SEQ ID NO: 47624 - RNA, 21 nt, RNAi
agcuggaguuggagagccguu

SEQ ID NO: 47625 - RNA, 21 nt, RNAi
uuucgaccucaaccucucggc

SEQ ID NO: 47626 - DNA, 21 bp, homo sapiens
gatccgagaggatgaagagag

SEQ ID NO: 47627 - RNA, 21 nt, RNAi
uccgagaggaugaagagaguu

SEQ ID NO: 47628 - RNA, 21 nt, RNAi
uuaggcucuccuacuucucuc

SEQ ID NO: 47629 - DNA, 21 bp, homo sapiens
gagaggatgaagagagagagg

SEQ ID NO: 47630 - RNA, 21 nt, RNAi
gaggaugaagagagagagguu

SEQ ID NO: 47631 - RNA, 21 nt, RNAi
uucuccuacuucucucucucc

SEQ ID NO: 47632 - DNA, 21 bp, homo sapiens
gagctcacactcaattcgcgg

SEQ ID NO: 47633 - RNA, 21 nt, RNAi
gcucacacucaauucgcgguu

SEQ ID NO: 47634 - RNA, 21 nt, RNAi
uucgagugugaguuaagcgcc

SEQ ID NO: 47635 - DNA, 21 bp, homo sapiens
gacgatactggacgatcacct

SEQ ID NO: 47636 - RNA, 21 nt, RNAi
cgauacuggacgaucaccuuu

SEQ ID NO: 47637 - RNA, 21 nt, RNAi
uugcuaugaccugcuagugga

SEQ ID NO: 47638 - DNA, 21 bp, homo sapiens
gatactggacgatcacctgtc

SEQ ID NO: 47639 - RNA, 21 nt, RNAi
uacuggacgaucaccugucuu

SEQ ID NO: 47640 - RNA, 21 nt, RNAi
uuaugaccugcuaguggacag

SEQ ID NO: 47641 - DNA, 21 bp, homo sapiens
gaccaccaccaccaccaccat

SEQ ID NO: 47642 - RNA, 21 nt, RNAi
ccaccaccaccaccaccauuu

SEQ ID NO: 47643 - RNA, 21 nt, RNAi
uugguggugguggugguggua

SEQ ID NO: 47644 - DNA, 21 bp, homo sapiens
gaccaagcagacgacgaagca

SEQ ID NO: 47645 - RNA, 21 nt, RNAi
ccaagcagacgacgaagcauu

SEQ ID NO: 47646 - RNA, 21 nt, RNAi
uugguucgucugcugcuucgu

SEQ ID NO: 47647 - DNA, 21 bp, homo sapiens
gacgacgaagcatgtccacca

SEQ ID NO: 47648 - RNA, 21 nt, RNAi
cgacgaagcauguccaccauu

SEQ ID NO: 47649 - RNA, 21 nt, RNAi
uugcugcuucguacagguggu

SEQ ID NO: 47650 - DNA, 21 bp, homo sapiens
gacgaagcatgtccaccacca

SEQ ID NO: 47651 - RNA, 21 nt, RNAi
cgaagcauguccaccaccauu

SEQ ID NO: 47652 - RNA, 21 nt, RNAi
uugcuucguacaggugguggu

SEQ ID NO: 47653 - DNA, 21 bp, homo sapiens
gaagcatgtccaccaccacta

SEQ ID NO: 47654 - RNA, 21 nt, RNAi
agcauguccaccaccacuauu

SEQ ID NO: 47655 - RNA, 21 nt, RNAi
uuucguacaggugguggugau

SEQ ID NO: 47656 - DNA, 21 bp, homo sapiens
gaccaaggaggagatcgaggc

SEQ ID NO: 47657 - RNA, 21 nt, RNAi
ccaaggaggagaucgaggcuu

SEQ ID NO: 47658 - RNA, 21 nt, RNAi
uugguuccuccucuagcuccg

SEQ ID NO: 47659 - DNA, 21 bp, homo sapiens
gagtattactgctactcgaaa

SEQ ID NO: 47660 - RNA, 21 nt, RNAi
guauuacugcuacucgaaauu

SEQ ID NO: 47661 - RNA, 21 nt, RNAi
uucauaaugacgaugagcuuu

SEQ ID NO: 47662 - DNA, 21 bp, homo sapiens
gagcagtttggcggcagcaga

SEQ ID NO: 47663 - RNA, 21 nt, RNAi
gcaguuuggcggcagcagauu

SEQ ID NO: 47664 - RNA, 21 nt, RNAi
uucgucaaaccgccgucgucu

SEQ ID NO: 47665 - DNA, 21 bp, homo sapiens
gaggaaggagacaggtcgcag

SEQ ID NO: 47666 - RNA, 21 nt, RNAi
ggaaggagacaggucgcaguu

SEQ ID NO: 47667 - RNA, 21 nt, RNAi
uuccuuccucuguccagcguc

SEQ ID NO: 47668 - DNA, 21 bp, homo sapiens
gaaggagacaggtcgcaggat

SEQ ID NO: 47669 - RNA, 21 nt, RNAi
aggagacaggucgcaggauuu

SEQ ID NO: 47670 - RNA, 21 nt, RNAi
uuuccucuguccagcguccua

SEQ ID NO: 47671 - DNA, 21 bp, homo sapiens
gagacaggtcgcaggatgtct

SEQ ID NO: 47672 - RNA, 21 nt, RNAi
gacaggucgcaggaugucuuu

SEQ ID NO: 47673 - RNA, 21 nt, RNAi
uucuguccagcguccuacaga

SEQ ID NO: 47674 - DNA, 21 bp, homo sapiens
gacaggtcgcaggatgtctgg

SEQ ID NO: 47675 - RNA, 21 nt, RNAi
caggucgcaggaugucugguu

SEQ ID NO: 47676 - RNA, 21 nt, RNAi
uuguccagcguccuacagacc

SEQ ID NO: 47677 - DNA, 21 bp, homo sapiens
gatgtctggcagtggatgctg

SEQ ID NO: 47678 - RNA, 21 nt, RNAi
ugucuggcaguggaugcuguu

SEQ ID NO: 47679 - RNA, 21 nt, RNAi
uuacagaccgucaccuacgac

SEQ ID NO: 47680 - DNA, 21 bp, homo sapiens
gatgctggagagtgagcggca

SEQ ID NO: 47681 - RNA, 21 nt, RNAi
ugcuggagagugagcggcauu

SEQ ID NO: 47682 - RNA, 21 nt, RNAi
uuacgaccucucacucgccgu

SEQ ID NO: 47683 - DNA, 21 bp, homo sapiens
gagagtgagcggcagagcaag

SEQ ID NO: 47684 - RNA, 21 nt, RNAi
gagugagcggcagagcaaguu

SEQ ID NO: 47685 - RNA, 21 nt, RNAi
uucucacucgccgucucguuc

SEQ ID NO: 47686 - DNA, 21 bp, homo sapiens
gacaggaatcattcggccact

SEQ ID NO: 47687 - RNA, 21 nt, RNAi
caggaaucauucggccacuuu

SEQ ID NO: 47688 - RNA, 21 nt, RNAi
uuguccuuaguaagccgguga

SEQ ID NO: 47689 - DNA, 21 bp, homo sapiens
gaatcattcggccactgttca

SEQ ID NO: 47690 - RNA, 21 nt, RNAi
aucauucggccacuguucauu

SEQ ID NO: 47691 - RNA, 21 nt, RNAi
uuuaguaagccggugacaagu

SEQ ID NO: 47692 - DNA, 21 bp, homo sapiens
gaagatcacaaagagccaaag

SEQ ID NO: 47693 - RNA, 21 nt, RNAi
agaucacaaagagccaaaguu

SEQ ID NO: 47694 - RNA, 21 nt, RNAi
uuucuaguguuucucgguuuc

SEQ ID NO: 47695 - DNA, 21 bp, homo sapiens
gatcacaaagagccaaagaaa

SEQ ID NO: 47696 - RNA, 21 nt, RNAi
ucacaaagagccaaagaaauu

SEQ ID NO: 47697 - RNA, 21 nt, RNAi
uuaguguuucucgguuucuuu

SEQ ID NO: 47698 - DNA, 21 bp, homo sapiens
gagccaaagaaactggcaggt

SEQ ID NO: 47699 - RNA, 21 nt, RNAi
gccaaagaaacuggcagguuu

SEQ ID NO: 47700 - RNA, 21 nt, RNAi
uucgguuucuuugaccgucca

SEQ ID NO: 47701 - DNA, 21 bp, homo sapiens
gaaactggcaggtgtccacgc

SEQ ID NO: 47702 - RNA, 21 nt, RNAi
aacuggcagguguccacgcuu

SEQ ID NO: 47703 - RNA, 21 nt, RNAi
uuuugaccguccacaggugcg

SEQ ID NO: 47704 - DNA, 21 bp, homo sapiens
gagttggttgtcacttacttt

SEQ ID NO: 47705 - RNA, 21 nt, RNAi
guugguugucacuuacuuuuu

SEQ ID NO: 47706 - RNA, 21 nt, RNAi
uucaaccaacagugaaugaaa

SEQ ID NO: 47707 - DNA, 21 bp, homo sapiens
gaagaaattccataccggagg

SEQ ID NO: 47708 - RNA, 21 nt, RNAi
agaaauuccauaccggagguu

SEQ ID NO: 47709 - RNA, 21 nt, RNAi
uuucuuuaagguauggccucc

SEQ ID NO: 47710 - DNA, 21 bp, homo sapiens
gaaattccataccggaggatg

SEQ ID NO: 47711 - RNA, 21 nt, RNAi
aauuccauaccggaggauguu

SEQ ID NO: 47712 - RNA, 21 nt, RNAi
uuuuaagguauggccuccuac

SEQ ID NO: 47713 - DNA, 21 bp, homo sapiens
gaggatgctgaaggctcagag

SEQ ID NO: 47714 - RNA, 21 nt, RNAi
ggaugcugaaggcucagaguu

SEQ ID NO: 47715 - RNA, 21 nt, RNAi
uuccuacgacuuccgagucuc

SEQ ID NO: 47716 - DNA, 21 bp, homo sapiens
gatgctgaaggctcagagctt

SEQ ID NO: 47717 - RNA, 21 nt, RNAi
ugcugaaggcucagagcuuuu

SEQ ID NO: 47718 - RNA, 21 nt, RNAi
uuacgacuuccgagucucgaa

SEQ ID NO: 47719 - DNA, 21 bp, homo sapiens
gatgagtttgcctgtggagcg

SEQ ID NO: 47720 - RNA, 21 nt, RNAi
ugaguuugccuguggagcguu

SEQ ID NO: 47721 - RNA, 21 nt, RNAi
uuacucaaacggacaccucgc

SEQ ID NO: 47722 - DNA, 21 bp, homo sapiens
gagtttgcctgtggagcggtg

SEQ ID NO: 47723 - RNA, 21 nt, RNAi
guuugccuguggagcgguguu

SEQ ID NO: 47724 - RNA, 21 nt, RNAi
uucaaacggacaccucgccac

SEQ ID NO: 47725 - DNA, 21 bp, homo sapiens
gagcggtgtttgaggagatct

SEQ ID NO: 47726 - RNA, 21 nt, RNAi
gcgguguuugaggagaucuuu

SEQ ID NO: 47727 - RNA, 21 nt, RNAi
uucgccacaaacuccucuaga

SEQ ID NO: 47728 - DNA, 21 bp, homo sapiens
gatgtatgaaggccggattct

SEQ ID NO: 47729 - RNA, 21 nt, RNAi
uguaugaaggccggauucuuu

SEQ ID NO: 47730 - RNA, 21 nt, RNAi
uuacauacuuccggccuaaga

SEQ ID NO: 47731 - DNA, 21 bp, homo sapiens
gaagctcttgtgaactgtctt

SEQ ID NO: 47732 - RNA, 21 nt, RNAi
agcucuugugaacugucuuuu

SEQ ID NO: 47733 - RNA, 21 nt, RNAi
uuucgagaacacuugacagaa

SEQ ID NO: 47734 - DNA, 21 bp, homo sapiens
gaactgtcttggctgtgagca

SEQ ID NO: 47735 - RNA, 21 nt, RNAi
acugucuuggcugugagcauu

SEQ ID NO: 47736 - RNA, 21 nt, RNAi
uuugacagaaccgacacucgu

SEQ ID NO: 47737 - DNA, 21 bp, homo sapiens
gaagaagacaaagtctaagga

SEQ ID NO: 47738 - RNA, 21 nt, RNAi
agaagacaaagucuaaggauu

SEQ ID NO: 47739 - RNA, 21 nt, RNAi
uuucuucuguuucagauuccu

SEQ ID NO: 47740 - DNA, 21 bp, homo sapiens
gaagacaaagtctaaggaaga

SEQ ID NO: 47741 - RNA, 21 nt, RNAi
agacaaagucuaaggaagauu

SEQ ID NO: 47742 - RNA, 21 nt, RNAi
uuucuguuucagauuccuucu

SEQ ID NO: 47743 - DNA, 21 bp, homo sapiens
gacaaagtctaaggaagaatc

SEQ ID NO: 47744 - RNA, 21 nt, RNAi
caaagucuaaggaagaaucuu

SEQ ID NO: 47745 - RNA, 21 nt, RNAi
uuguuucagauuccuucuuag

SEQ ID NO: 47746 - DNA, 21 bp, homo sapiens
gaccactcttggctattgaag

SEQ ID NO: 47747 - RNA, 21 nt, RNAi
ccacucuuggcuauugaaguu

SEQ ID NO: 47748 - RNA, 21 nt, RNAi
uuggugagaaccgauaacuuc

SEQ ID NO: 47749 - DNA, 21 bp, homo sapiens
gaagatgctgcctgtatttga

SEQ ID NO: 47750 - RNA, 21 nt, RNAi
agaugcugccuguauuugauu

SEQ ID NO: 47751 - RNA, 21 nt, RNAi
uuucuacgacggacauaaacu

SEQ ID NO: 47752 - DNA, 21 bp, homo sapiens
gatgctgcctgtatttgagag

SEQ ID NO: 47753 - RNA, 21 nt, RNAi
ugcugccuguauuugagaguu

SEQ ID NO: 47754 - RNA, 21 nt, RNAi
uuacgacggacauaaacucuc

SEQ ID NO: 47755 - DNA, 21 bp, homo sapiens
gagagactgccatacataata

SEQ ID NO: 47756 - RNA, 21 nt, RNAi
gagacugccauacauaauauu

SEQ ID NO: 47757 - RNA, 21 nt, RNAi
uucucugacgguauguauuau

SEQ ID NO: 47758 - DNA, 21 bp, homo sapiens
gagactgccatacataatata

SEQ ID NO: 47759 - RNA, 21 nt, RNAi
gacugccauacauaauauauu

SEQ ID NO: 47760 - RNA, 21 nt, RNAi
uucugacgguauguauuauau

SEQ ID NO: 47761 - DNA, 21 bp, homo sapiens
gactgccatacataatatatg

SEQ ID NO: 47762 - RNA, 21 nt, RNAi
cugccauacauaauauauguu

SEQ ID NO: 47763 - RNA, 21 nt, RNAi
uugacgguauguauuauauac

SEQ ID NO: 47764 - DNA, 21 bp, homo sapiens
gagaaactgtgtatagcttac

SEQ ID NO: 47765 - RNA, 21 nt, RNAi
gaaacuguguauagcuuacuu

SEQ ID NO: 47766 - RNA, 21 nt, RNAi
uucuuugacacauaucgaaug

SEQ ID NO: 47767 - DNA, 21 bp, homo sapiens
gaaactgtgtatagcttacct

SEQ ID NO: 47768 - RNA, 21 nt, RNAi
aacuguguauagcuuaccuuu

SEQ ID NO: 47769 - RNA, 21 nt, RNAi
uuuugacacauaucgaaugga

SEQ ID NO: 47770 - DNA, 21 bp, homo sapiens
gaacaggaatccttactgata

SEQ ID NO: 47771 - RNA, 21 nt, RNAi
acaggaauccuuacugauauu

SEQ ID NO: 47772 - RNA, 21 nt, RNAi
uuuguccuuaggaaugacuau

SEQ ID NO: 47773 - DNA, 21 bp, homo sapiens
gatatgctgctttaaacttgg

SEQ ID NO: 47774 - RNA, 21 nt, RNAi
uaugcugcuuuaaacuugguu

SEQ ID NO: 47775 - RNA, 21 nt, RNAi
uuauacgacgaaauuugaacc

SEQ ID NO: 47776 - DNA, 21 bp, homo sapiens
tagcgctatgttggtgacttg

SEQ ID NO: 47777 - RNA, 21 nt, RNAi
gcgcuauguuggugacuuguu

SEQ ID NO: 47778 - RNA, 21 nt, RNAi
uucgcgauacaaccacugaac

SEQ ID NO: 47779 - DNA, 21 bp, homo sapiens
tacctgttccgaactttcctg

SEQ ID NO: 47780 - RNA, 21 nt, RNAi
ccuguuccgaacuuuccuguu

SEQ ID NO: 47781 - RNA, 21 nt, RNAi
uuggacaaggcuugaaaggac

SEQ ID NO: 47782 - DNA, 21 bp, homo sapiens
taccttagacttctggtttgc

SEQ ID NO: 47783 - RNA, 21 nt, RNAi
ccuuagacuucugguuugcuu

SEQ ID NO: 47784 - RNA, 21 nt, RNAi
uuggaaucugaagaccaaacg

SEQ ID NO: 47785 - DNA, 21 bp, homo sapiens
tagacttctggtttgcctgca

SEQ ID NO: 47786 - RNA, 21 nt, RNAi
gacuucugguuugccugcauu

SEQ ID NO: 47787 - RNA, 21 nt, RNAi
uucugaagaccaaacggacgu

SEQ ID NO: 47788 - DNA, 21 bp, homo sapiens
tacgagtagccaaagcgatct

SEQ ID NO: 47789 - RNA, 21 nt, RNAi
cgaguagccaaagcgaucuuu

SEQ ID NO: 47790 - RNA, 21 nt, RNAi
uugcucaucgguuucgcuaga

SEQ ID NO: 47791 - DNA, 21 bp, homo sapiens
tacattgagaacaacagcatt

SEQ ID NO: 47792 - RNA, 21 nt, RNAi
cauugagaacaacagcauuuu

SEQ ID NO: 47793 - RNA, 21 nt, RNAi
uuguaacucuuguugucguaa

SEQ ID NO: 47794 - DNA, 21 bp, homo sapiens
tacataagagatggcatcaag

SEQ ID NO: 47795 - RNA, 21 nt, RNAi
cauaagagauggcaucaaguu

SEQ ID NO: 47796 - RNA, 21 nt, RNAi
uuguauucucuaccguaguuc

SEQ ID NO: 47797 - DNA, 21 bp, homo sapiens
taagagatggcatcaagaagc

SEQ ID NO: 47798 - RNA, 21 nt, RNAi
agagauggcaucaagaagcuu

SEQ ID NO: 47799 - RNA, 21 nt, RNAi
uuucucuaccguaguucuucg

SEQ ID NO: 47800 - DNA, 21 bp, homo sapiens
tatatacctcgaatatgtgag

SEQ ID NO: 47801 - RNA, 21 nt, RNAi
uauaccucgaauaugugaguu

SEQ ID NO: 47802 - RNA, 21 nt, RNAi
uuauauggagcuuauacacuc

SEQ ID NO: 47803 - DNA, 21 bp, homo sapiens
tatacctcgaatatgtgagga

SEQ ID NO: 47804 - RNA, 21 nt, RNAi
uaccucgaauaugugaggauu

SEQ ID NO: 47805 - RNA, 21 nt, RNAi
uuauggagcuuauacacuccu

SEQ ID NO: 47806 - DNA, 21 bp, homo sapiens
tacctcgaatatgtgaggagt

SEQ ID NO: 47807 - RNA, 21 nt, RNAi
ccucgaauaugugaggaguuu

SEQ ID NO: 47808 - RNA, 21 nt, RNAi
uuggagcuuauacacuccuca

SEQ ID NO: 47809 - DNA, 21 bp, homo sapiens
taaaggtcgtgtgtggctatc

SEQ ID NO: 47810 - RNA, 21 nt, RNAi
aaggucguguguggcuaucuu

SEQ ID NO: 47811 - RNA, 21 nt, RNAi
uuuuccagcacacaccgauag

SEQ ID NO: 47812 - DNA, 21 bp, homo sapiens
tacaggtccttcaagaggagc

SEQ ID NO: 47813 - RNA, 21 nt, RNAi
cagguccuucaagaggagcuu

SEQ ID NO: 47814 - RNA, 21 nt, RNAi
uuguccaggaaguucuccucg

SEQ ID NO: 47815 - DNA, 21 bp, homo sapiens
taatccttatcacataggttc

SEQ ID NO: 47816 - RNA, 21 nt, RNAi
auccuuaucacauagguucuu

SEQ ID NO: 47817 - RNA, 21 nt, RNAi
uuuaggaauaguguauccaag

SEQ ID NO: 47818 - DNA, 21 bp, homo sapiens
tatcacataggttctggctat

SEQ ID NO: 47819 - RNA, 21 nt, RNAi
ucacauagguucuggcuauuu

SEQ ID NO: 47820 - RNA, 21 nt, RNAi
uuaguguauccaagaccgaua

SEQ ID NO: 47821 - DNA, 21 bp, homo sapiens
taggttctggctatgtctttg

SEQ ID NO: 47822 - RNA, 21 nt, RNAi
gguucuggcuaugucuuuguu

SEQ ID NO: 47823 - RNA, 21 nt, RNAi
uuccaagaccgauacagaaac

SEQ ID NO: 47824 - DNA, 21 bp, homo sapiens
tatgtctttgcaccagccacc

SEQ ID NO: 47825 - RNA, 21 nt, RNAi
ugucuuugcaccagccaccuu

SEQ ID NO: 47826 - RNA, 21 nt, RNAi
uuacagaaacguggucggugg

SEQ ID NO: 47827 - DNA, 21 bp, homo sapiens
tatccagtgatgcgctgacgg

SEQ ID NO: 47828 - RNA, 21 nt, RNAi
uccagugaugcgcugacgguu

SEQ ID NO: 47829 - RNA, 21 nt, RNAi
uuaggucacuacgcgacugcc

SEQ ID NO: 47830 - DNA, 21 bp, homo sapiens
tagatggaattcctccttatc

SEQ ID NO: 47831 - RNA, 21 nt, RNAi
gauggaauuccuccuuaucuu

SEQ ID NO: 47832 - RNA, 21 nt, RNAi
uucuaccuuaaggaggaauag

SEQ ID NO: 47833 - DNA, 21 bp, homo sapiens
taagaaacagctccagagaga

SEQ ID NO: 47834 - RNA, 21 nt, RNAi
agaaacagcuccagagagauu

SEQ ID NO: 47835 - RNA, 21 nt, RNAi
uuucuuugucgaggucucucu

SEQ ID NO: 47836 - DNA, 21 bp, homo sapiens
tactggacgatcacctgtcca

SEQ ID NO: 47837 - RNA, 21 nt, RNAi
cuggacgaucaccuguccauu

SEQ ID NO: 47838 - RNA, 21 nt, RNAi
uugaccugcuaguggacaggu

SEQ ID NO: 47839 - DNA, 21 bp, homo sapiens
tacatccaccaccatgccgtc

SEQ ID NO: 47840 - RNA, 21 nt, RNAi
cauccaccaccaugccgucuu

SEQ ID NO: 47841 - RNA, 21 nt, RNAi
uuguagguggugguacggcag

SEQ ID NO: 47842 - DNA, 21 bp, homo sapiens
tattactgctactcgaaatgc

SEQ ID NO: 47843 - RNA, 21 nt, RNAi
uuacugcuacucgaaaugcuu

SEQ ID NO: 47844 - RNA, 21 nt, RNAi
uuaaugacgaugagcuuuacg

SEQ ID NO: 47845 - DNA, 21 bp, homo sapiens
tactgctactcgaaatgcaaa

SEQ ID NO: 47846 - RNA, 21 nt, RNAi
cugcuacucgaaaugcaaauu

SEQ ID NO: 47847 - RNA, 21 nt, RNAi
uugacgaugagcuuuacguuu

SEQ ID NO: 47848 - DNA, 21 bp, homo sapiens
taccggaggatgctgaaggct

SEQ ID NO: 47849 - RNA, 21 nt, RNAi
ccggaggaugcugaaggcuuu

SEQ ID NO: 47850 - RNA, 21 nt, RNAi
uuggccuccuacgacuuccga

SEQ ID NO: 47851 - DNA, 21 bp, homo sapiens
taaggaagaatcggccagtgg

SEQ ID NO: 47852 - RNA, 21 nt, RNAi
aggaagaaucggccagugguu

SEQ ID NO: 47853 - RNA, 21 nt, RNAi
uuuccuucuuagccggucacc

SEQ ID NO: 47854 - DNA, 21 bp, homo sapiens
tattgaagatgctgcctgtat

SEQ ID NO: 47855 - RNA, 21 nt, RNAi
uugaagaugcugccuguauuu

SEQ ID NO: 47856 - RNA, 21 nt, RNAi
uuaacuucuacgacggacaua

SEQ ID NO: 47857 - DNA, 21 bp, homo sapiens
tatttgagagactgccataca

SEQ ID NO: 47858 - RNA, 21 nt, RNAi
uuugagagacugccauacauu

SEQ ID NO: 47859 - RNA, 21 nt, RNAi
uuaaacucucugacgguaugu

SEQ ID NO: 47860 - DNA, 21 bp, homo sapiens
taagagaaactgtgtatagct

SEQ ID NO: 47861 - RNA, 21 nt, RNAi
agagaaacuguguauagcuuu

SEQ ID NO: 47862 - RNA, 21 nt, RNAi
uuucucuuugacacauaucga

SEQ ID NO: 47863 - DNA, 21 bp, homo sapiens
tatagcttacctgaacaggaa

SEQ ID NO: 47864 - RNA, 21 nt, RNAi
uagcuuaccugaacaggaauu

SEQ ID NO: 47865 - RNA, 21 nt, RNAi
uuaucgaauggacuuguccuu

SEQ ID NO: 47866 - DNA, 21 bp, homo sapiens
tagcttacctgaacaggaatc

SEQ ID NO: 47867 - RNA, 21 nt, RNAi
gcuuaccugaacaggaaucuu

SEQ ID NO: 47868 - RNA, 21 nt, RNAi
uucgaauggacuuguccuuag

SEQ ID NO: 47869 - DNA, 21 bp, homo sapiens
tacctgaacaggaatccttac

SEQ ID NO: 47870 - RNA, 21 nt, RNAi
ccugaacaggaauccuuacuu

SEQ ID NO: 47871 - RNA, 21 nt, RNAi
uuggacuuguccuuaggaaug

SEQ ID NO: 47872 - DNA, 21 bp, homo sapiens
tatggatatgctgctttaaac

SEQ ID NO: 47873 - RNA, 21 nt, RNAi
uggauaugcugcuuuaaacuu

SEQ ID NO: 47874 - RNA, 21 nt, RNAi
uuaccuauacgacgaaauuug

SEQ ID NO: 47875 - DNA, 21 bp, homo sapiens
aaactttacgagtagccaaag

SEQ ID NO: 47876 - RNA, 21 nt, RNAi
acuuuacgaguagccaaaguu

SEQ ID NO: 47877 - RNA, 21 nt, RNAi
uuugaaaugcucaucgguuuc

SEQ ID NO: 47878 - DNA, 21 bp, homo sapiens
aactttacgagtagccaaagc

SEQ ID NO: 47879 - RNA, 21 nt, RNAi
cuuuacgaguagccaaagcuu

SEQ ID NO: 47880 - RNA, 21 nt, RNAi
uugaaaugcucaucgguuucg

SEQ ID NO: 47881 - DNA, 21 bp, homo sapiens
aagcagcagattgattccatc

SEQ ID NO: 47882 - RNA, 21 nt, RNAi
gcagcagauugauuccaucuu

SEQ ID NO: 47883 - RNA, 21 nt, RNAi
uucgucgucuaacuaagguag

SEQ ID NO: 47884 - DNA, 21 bp, homo sapiens
aagtgcaaactttcgccaacc

SEQ ID NO: 47885 - RNA, 21 nt, RNAi
gugcaaacuuucgccaaccuu

SEQ ID NO: 47886 - RNA, 21 nt, RNAi
uucacguuugaaagcgguugg

SEQ ID NO: 47887 - DNA, 21 bp, homo sapiens
aaactttcgccaaccgtggtt

SEQ ID NO: 47888 - RNA, 21 nt, RNAi
acuuucgccaaccgugguuuu

SEQ ID NO: 47889 - RNA, 21 nt, RNAi
uuugaaagcgguuggcaccaa

SEQ ID NO: 47890 - DNA, 21 bp, homo sapiens
aagaggagcgatcctgttaat

SEQ ID NO: 47891 - RNA, 21 nt, RNAi
gaggagcgauccuguuaauuu

SEQ ID NO: 47892 - RNA, 21 nt, RNAi
uucuccucgcuaggacaauua

SEQ ID NO: 47893 - DNA, 21 bp, homo sapiens
aacgacagtgagatatccagt

SEQ ID NO: 47894 - RNA, 21 nt, RNAi
cgacagugagauauccaguuu

SEQ ID NO: 47895 - RNA, 21 nt, RNAi
uugcugucacucuauagguca

SEQ ID NO: 47896 - DNA, 21 bp, homo sapiens
aaatgcatcgcagtgtgaagg

SEQ ID NO: 47897 - RNA, 21 nt, RNAi
augcaucgcagugugaagguu

SEQ ID NO: 47898 - RNA, 21 nt, RNAi
uuuacguagcgucacacuucc

SEQ ID NO: 47899 - DNA, 21 bp, homo sapiens
aatcattcggccactgttcag

SEQ ID NO: 47900 - RNA, 21 nt, RNAi
ucauucggccacuguucaguu

SEQ ID NO: 47901 - RNA, 21 nt, RNAi
uuaguaagccggugacaaguc

SEQ ID NO: 47902 - DNA, 21 bp, homo sapiens
aagaaattccataccggagga

SEQ ID NO: 47903 - RNA, 21 nt, RNAi
gaaauuccauaccggaggauu

SEQ ID NO: 47904 - RNA, 21 nt, RNAi
uucuuuaagguauggccuccu

SEQ ID NO: 47905 - DNA, 21 bp, homo sapiens
aaattccataccggaggatgc

SEQ ID NO: 47906 - RNA, 21 nt, RNAi
auuccauaccggaggaugcuu

SEQ ID NO: 47907 - RNA, 21 nt, RNAi
uuuaagguauggccuccuacg

SEQ ID NO: 47908 - DNA, 21 bp, homo sapiens
aattccataccggaggatgct

SEQ ID NO: 47909 - RNA, 21 nt, RNAi
uuccauaccggaggaugcuuu

SEQ ID NO: 47910 - RNA, 21 nt, RNAi
uuaagguauggccuccuacga

SEQ ID NO: 47911 - DNA, 21 bp, homo sapiens
aaagcaagcgatgagtttgcc

SEQ ID NO: 47912 - RNA, 21 nt, RNAi
agcaagcgaugaguuugccuu

SEQ ID NO: 47913 - RNA, 21 nt, RNAi
uuucguucgcuacucaaacgg

SEQ ID NO: 47914 - DNA, 21 bp, homo sapiens
aagcaagcgatgagtttgcct

SEQ ID NO: 47915 - RNA, 21 nt, RNAi
gcaagcgaugaguuugccuuu

SEQ ID NO: 47916 - RNA, 21 nt, RNAi
uucguucgcuacucaaacgga

SEQ ID NO: 47917 - DNA, 21 bp, homo sapiens
cagcattgtctccaagcagct

SEQ ID NO: 47918 - RNA, 21 nt, RNAi
gcauugucuccaagcagcuuu

SEQ ID NO: 47919 - RNA, 21 nt, RNAi
uucguaacagagguucgucga

SEQ ID NO: 47920 - DNA, 21 bp, homo sapiens
cacagcttacatgagtaatgg

SEQ ID NO: 47921 - RNA, 21 nt, RNAi
cagcuuacaugaguaaugguu

SEQ ID NO: 47922 - RNA, 21 nt, RNAi
uugucgaauguacucauuacc

SEQ ID NO: 47923 - DNA, 21 bp, homo sapiens
caagtgcaaactttcgccaac

SEQ ID NO: 47924 - RNA, 21 nt, RNAi
agugcaaacuuucgccaacuu

SEQ ID NO: 47925 - RNA, 21 nt, RNAi
uuucacguuugaaagcgguug

SEQ ID NO: 47926 - DNA, 21 bp, homo sapiens
caaactttcgccaaccgtggt

SEQ ID NO: 47927 - RNA, 21 nt, RNAi
aacuuucgccaaccgugguuu

SEQ ID NO: 47928 - RNA, 21 nt, RNAi
uuuugaaagcgguuggcacca

SEQ ID NO: 47929 - DNA, 21 bp, homo sapiens
caagaggagcgatcctgttaa

SEQ ID NO: 47930 - RNA, 21 nt, RNAi
agaggagcgauccuguuaauu

SEQ ID NO: 47931 - RNA, 21 nt, RNAi
uuucuccucgcuaggacaauu

SEQ ID NO: 47932 - DNA, 21 bp, homo sapiens
caacgacagtgagatatccag

SEQ ID NO: 47933 - RNA, 21 nt, RNAi
acgacagugagauauccaguu

SEQ ID NO: 47934 - RNA, 21 nt, RNAi
uuugcugucacucuauagguc

SEQ ID NO: 47935 - DNA, 21 bp, homo sapiens
catgacggacagcagtgtaga

SEQ ID NO: 47936 - RNA, 21 nt, RNAi
ugacggacagcaguguagauu

SEQ ID NO: 47937 - RNA, 21 nt, RNAi
uuacugccugucgucacaucu

SEQ ID NO: 47938 - DNA, 21 bp, homo sapiens
cagacgatactggacgatcac

SEQ ID NO: 47939 - RNA, 21 nt, RNAi
gacgauacuggacgaucacuu

SEQ ID NO: 47940 - RNA, 21 nt, RNAi
uucugcuaugaccugcuagug

SEQ ID NO: 47941 - DNA, 21 bp, homo sapiens
caagcagacgacgaagcatgt

SEQ ID NO: 47942 - RNA, 21 nt, RNAi
agcagacgacgaagcauguuu

SEQ ID NO: 47943 - RNA, 21 nt, RNAi
uuucgucugcugcuucguaca

SEQ ID NO: 47944 - DNA, 21 bp, homo sapiens
caggaatcattcggccactgt

SEQ ID NO: 47945 - RNA, 21 nt, RNAi
ggaaucauucggccacuguuu

SEQ ID NO: 47946 - RNA, 21 nt, RNAi
uuccuuaguaagccggugaca

SEQ ID NO: 47947 - DNA, 21 bp, homo sapiens
cagtgagttggttgtcactta

SEQ ID NO: 47948 - RNA, 21 nt, RNAi
gugaguugguugucacuuauu

SEQ ID NO: 47949 - RNA, 21 nt, RNAi
uucacucaaccaacagugaau

SEQ ID NO: 47950 - DNA, 21 bp, homo sapiens
cactttaaagagcagctcagc

SEQ ID NO: 47951 - RNA, 21 nt, RNAi
cuuuaaagagcagcucagcuu

SEQ ID NO: 47952 - RNA, 21 nt, RNAi
uugaaauuucucgucgagucg

SEQ ID NO: 47953 - DNA, 21 bp, homo sapiens
caagcgatgagtttgcctgtg

SEQ ID NO: 47954 - RNA, 21 nt, RNAi
agcgaugaguuugccuguguu

SEQ ID NO: 47955 - RNA, 21 nt, RNAi
uuucgcuacucaaacggacac

SEQ ID NO: 47956 - DNA, 21 bp, homo sapiens
gaagcagcagattgattccat

SEQ ID NO: 47957 - RNA, 21 nt, RNAi
agcagcagauugauuccauuu

SEQ ID NO: 47958 - RNA, 21 nt, RNAi
uuucgucgucuaacuaaggua

SEQ ID NO: 47959 - DNA, 21 bp, homo sapiens
gacttctgatatatacctcga

SEQ ID NO: 47960 - RNA, 21 nt, RNAi
cuucugauauauaccucgauu

SEQ ID NO: 47961 - RNA, 21 nt, RNAi
uugaagacuauauauggagcu

SEQ ID NO: 47962 - DNA, 21 bp, homo sapiens
gacttgtgccgacttcaagtg

SEQ ID NO: 47963 - RNA, 21 nt, RNAi
cuugugccgacuucaaguguu

SEQ ID NO: 47964 - RNA, 21 nt, RNAi
uugaacacggcugaaguucac

SEQ ID NO: 47965 - DNA, 21 bp, homo sapiens
gacttcaagtgcaaactttcg

SEQ ID NO: 47966 - RNA, 21 nt, RNAi
cuucaagugcaaacuuucguu

SEQ ID NO: 47967 - RNA, 21 nt, RNAi
uugaaguucacguuugaaagc

SEQ ID NO: 47968 - DNA, 21 bp, homo sapiens
gaggtccacggaaactgttga

SEQ ID NO: 47969 - RNA, 21 nt, RNAi
gguccacggaaacuguugauu

SEQ ID NO: 47970 - RNA, 21 nt, RNAi
uuccaggugccuuugacaacu

SEQ ID NO: 47971 - DNA, 21 bp, homo sapiens
gaggagcgatcctgttaatcc

SEQ ID NO: 47972 - RNA, 21 nt, RNAi
ggagcgauccuguuaauccuu

SEQ ID NO: 47973 - RNA, 21 nt, RNAi
uuccucgcuaggacaauuagg

SEQ ID NO: 47974 - DNA, 21 bp, homo sapiens
gatcctgttaatccttatcac

SEQ ID NO: 47975 - RNA, 21 nt, RNAi
uccuguuaauccuuaucacuu

SEQ ID NO: 47976 - RNA, 21 nt, RNAi
uuaggacaauuaggaauagug

SEQ ID NO: 47977 - DNA, 21 bp, homo sapiens
gagatatccagtgatgcgctg

SEQ ID NO: 47978 - RNA, 21 nt, RNAi
gauauccagugaugcgcuguu

SEQ ID NO: 47979 - RNA, 21 nt, RNAi
uucuauaggucacuacgcgac

SEQ ID NO: 47980 - DNA, 21 bp, homo sapiens
gatatccagtgatgcgctgac

SEQ ID NO: 47981 - RNA, 21 nt, RNAi
uauccagugaugcgcugacuu

SEQ ID NO: 47982 - RNA, 21 nt, RNAi
uuauaggucacuacgcgacug

SEQ ID NO: 47983 - DNA, 21 bp, homo sapiens
gacagcagtgtagatggaatt

SEQ ID NO: 47984 - RNA, 21 nt, RNAi
cagcaguguagauggaauuuu

SEQ ID NO: 47985 - RNA, 21 nt, RNAi
uugucgucacaucuaccuuaa

SEQ ID NO: 47986 - DNA, 21 bp, homo sapiens
gatggaattcctccttatcgt

SEQ ID NO: 47987 - RNA, 21 nt, RNAi
uggaauuccuccuuaucguuu

SEQ ID NO: 47988 - RNA, 21 nt, RNAi
uuaccuuaaggaggaauagca

SEQ ID NO: 47989 - DNA, 21 bp, homo sapiens
gaattcctccttatcgtgtgg

SEQ ID NO: 47990 - RNA, 21 nt, RNAi
auuccuccuuaucgugugguu

SEQ ID NO: 47991 - RNA, 21 nt, RNAi
uuuaaggaggaauagcacacc

SEQ ID NO: 47992 - DNA, 21 bp, homo sapiens
gaaatgcatcgcagtgtgaag

SEQ ID NO: 47993 - RNA, 21 nt, RNAi
aaugcaucgcagugugaaguu

SEQ ID NO: 47994 - RNA, 21 nt, RNAi
uuuuacguagcgucacacuuc

SEQ ID NO: 47995 - DNA, 21 bp, homo sapiens
gacgatactggacgatcacct

SEQ ID NO: 47996 - RNA, 21 nt, RNAi
cgauacuggacgaucaccuuu

SEQ ID NO: 47997 - RNA, 21 nt, RNAi
uugcuaugaccugcuagugga

SEQ ID NO: 47998 - DNA, 21 bp, homo sapiens
gatactggacgatcacctgtc

SEQ ID NO: 47999 - RNA, 21 nt, RNAi
uacuggacgaucaccugucuu

SEQ ID NO: 48000 - RNA, 21 nt, RNAi
uuaugaccugcuaguggacag

SEQ ID NO: 48001 - DNA, 21 bp, homo sapiens
gagtattactgctactcgaaa

SEQ ID NO: 48002 - RNA, 21 nt, RNAi
guauuacugcuacucgaaauu

SEQ ID NO: 48003 - RNA, 21 nt, RNAi
uucauaaugacgaugagcuuu

SEQ ID NO: 48004 - DNA, 21 bp, homo sapiens
gacaggaatcattcggccact

SEQ ID NO: 48005 - RNA, 21 nt, RNAi
caggaaucauucggccacuuu

SEQ ID NO: 48006 - RNA, 21 nt, RNAi
uuguccuuaguaagccgguga

SEQ ID NO: 48007 - DNA, 21 bp, homo sapiens
gaatcattcggccactgttca

SEQ ID NO: 48008 - RNA, 21 nt, RNAi
aucauucggccacuguucauu

SEQ ID NO: 48009 - RNA, 21 nt, RNAi
uuuaguaagccggugacaagu

SEQ ID NO: 48010 - DNA, 21 bp, homo sapiens
gaagaaattccataccggagg

SEQ ID NO: 48011 - RNA, 21 nt, RNAi
agaaauuccauaccggagguu

SEQ ID NO: 48012 - RNA, 21 nt, RNAi
uuucuuuaagguauggccucc

SEQ ID NO: 48013 - DNA, 21 bp, homo sapiens
gaaattccataccggaggatg

SEQ ID NO: 48014 - RNA, 21 nt, RNAi
aauuccauaccggaggauguu

SEQ ID NO: 48015 - RNA, 21 nt, RNAi
uuuuaagguauggccuccuac

SEQ ID NO: 48016 - DNA, 21 bp, homo sapiens
tatatacctcgaatatgtgag

SEQ ID NO: 48017 - RNA, 21 nt, RNAi
uauaccucgaauaugugaguu

SEQ ID NO: 48018 - RNA, 21 nt, RNAi
uuauauggagcuuauacacuc

SEQ ID NO: 48019 - DNA, 21 bp, homo sapiens
tatacctcgaatatgtgagga

SEQ ID NO: 48020 - RNA, 21 nt, RNAi
uaccucgaauaugugaggauu

SEQ ID NO: 48021 - RNA, 21 nt, RNAi
uuauggagcuuauacacuccu

SEQ ID NO: 48022 - DNA, 21 bp, homo sapiens
tacctcgaatatgtgaggagt

SEQ ID NO: 48023 - RNA, 21 nt, RNAi
ccucgaauaugugaggaguuu

SEQ ID NO: 48024 - RNA, 21 nt, RNAi
uuggagcuuauacacuccuca

SEQ ID NO: 48025 - DNA, 21 bp, homo sapiens
tattactgctactcgaaatgc

SEQ ID NO: 48026 - RNA, 21 nt, RNAi
uuacugcuacucgaaaugcuu

SEQ ID NO: 48027 - RNA, 21 nt, RNAi
uuaaugacgaugagcuuuacg

SEQ ID NO: 48028 - DNA, 21 bp, homo sapiens
tactgctactcgaaatgcaaa

SEQ ID NO: 48029 - RNA, 21 nt, RNAi
cugcuacucgaaaugcaaauu

SEQ ID NO: 48030 - RNA, 21 nt, RNAi
uugacgaugagcuuuacguuu

SEQ ID NO: 48031 - DNA, 21 bp, homo sapiens
aatggcaggacaagcgtttag

SEQ ID NO: 48032 - RNA, 21 nt, RNAi
uggcaggacaagcguuuaguu

SEQ ID NO: 48033 - RNA, 21 nt, RNAi
uuaccguccuguucgcaaauc

SEQ ID NO: 48034 - DNA, 21 bp, homo sapiens
aagcgtttagaaagtttcttc

SEQ ID NO: 48035 - RNA, 21 nt, RNAi
gcguuuagaaaguuucuucuu

SEQ ID NO: 48036 - RNA, 21 nt, RNAi
uucgcaaaucuuucaaagaag

SEQ ID NO: 48037 - DNA, 21 bp, homo sapiens
aaagtttcttccactctttga

SEQ ID NO: 48038 - RNA, 21 nt, RNAi
aguuucuuccacucuuugauu

SEQ ID NO: 48039 - RNA, 21 nt, RNAi
uuucaaagaaggugagaaacu

SEQ ID NO: 48040 - DNA, 21 bp, homo sapiens
aagtttcttccactctttgac

SEQ ID NO: 48041 - RNA, 21 nt, RNAi
guuucuuccacucuuugacuu

SEQ ID NO: 48042 - RNA, 21 nt, RNAi
uucaaagaaggugagaaacug

SEQ ID NO: 48043 - DNA, 21 bp, homo sapiens
aaaggagtgctgctgaaactg

SEQ ID NO: 48044 - RNA, 21 nt, RNAi
aggagugcugcugaaacuguu

SEQ ID NO: 48045 - RNA, 21 nt, RNAi
uuuccucacgacgacuuugac

SEQ ID NO: 48046 - DNA, 21 bp, homo sapiens
aaggagtgctgctgaaactgt

SEQ ID NO: 48047 - RNA, 21 nt, RNAi
ggagugcugcugaaacuguuu

SEQ ID NO: 48048 - RNA, 21 nt, RNAi
uuccucacgacgacuuugaca

SEQ ID NO: 48049 - DNA, 21 bp, homo sapiens
aaactgtaaccaaaggaggca

SEQ ID NO: 48050 - RNA, 21 nt, RNAi
acuguaaccaaaggaggcauu

SEQ ID NO: 48051 - RNA, 21 nt, RNAi
uuugacauugguuuccuccgu

SEQ ID NO: 48052 - DNA, 21 bp, homo sapiens
aactgtaaccaaaggaggcat

SEQ ID NO: 48053 - RNA, 21 nt, RNAi
cuguaaccaaaggaggcauuu

SEQ ID NO: 48054 - RNA, 21 nt, RNAi
uugacauugguuuccuccgua

SEQ ID NO: 48055 - DNA, 21 bp, homo sapiens
aaccaaaggaggcattatgct

SEQ ID NO: 48056 - RNA, 21 nt, RNAi
ccaaaggaggcauuaugcuuu

SEQ ID NO: 48057 - RNA, 21 nt, RNAi
uugguuuccuccguaauacga

SEQ ID NO: 48058 - DNA, 21 bp, homo sapiens
aaaggaggcattatgcttcca

SEQ ID NO: 48059 - RNA, 21 nt, RNAi
aggaggcauuaugcuuccauu

SEQ ID NO: 48060 - RNA, 21 nt, RNAi
uuuccuccguaauacgaaggu

SEQ ID NO: 48061 - DNA, 21 bp, homo sapiens
aaggaggcattatgcttccag

SEQ ID NO: 48062 - RNA, 21 nt, RNAi
ggaggcauuaugcuuccaguu

SEQ ID NO: 48063 - RNA, 21 nt, RNAi
uuccuccguaauacgaagguc

SEQ ID NO: 48064 - DNA, 21 bp, homo sapiens
aaagtattgcaagcaacagta

SEQ ID NO: 48065 - RNA, 21 nt, RNAi
aguauugcaagcaacaguauu

SEQ ID NO: 48066 - RNA, 21 nt, RNAi
uuucauaacguucguugucau

SEQ ID NO: 48067 - DNA, 21 bp, homo sapiens
aagtattgcaagcaacagtag

SEQ ID NO: 48068 - RNA, 21 nt, RNAi
guauugcaagcaacaguaguu

SEQ ID NO: 48069 - RNA, 21 nt, RNAi
uucauaacguucguugucauc

SEQ ID NO: 48070 - DNA, 21 bp, homo sapiens
aagcaacagtagtcgctgttg

SEQ ID NO: 48071 - RNA, 21 nt, RNAi
gcaacaguagucgcuguuguu

SEQ ID NO: 48072 - RNA, 21 nt, RNAi
uucguugucaucagcgacaac

SEQ ID NO: 48073 - DNA, 21 bp, homo sapiens
aacagtagtcgctgttggatc

SEQ ID NO: 48074 - RNA, 21 nt, RNAi
caguagucgcuguuggaucuu

SEQ ID NO: 48075 - RNA, 21 nt, RNAi
uugucaucagcgacaaccuag

SEQ ID NO: 48076 - DNA, 21 bp, homo sapiens
aaccagttagcgtgaaagttg

SEQ ID NO: 48077 - RNA, 21 nt, RNAi
ccaguuagcgugaaaguuguu

SEQ ID NO: 48078 - RNA, 21 nt, RNAi
uuggucaaucgcacuuucaac

SEQ ID NO: 48079 - DNA, 21 bp, homo sapiens
aagttggagataaagttcttc

SEQ ID NO: 48080 - RNA, 21 nt, RNAi
guuggagauaaaguucuucuu

SEQ ID NO: 48081 - RNA, 21 nt, RNAi
uucaaccucuauuucaagaag

SEQ ID NO: 48082 - DNA, 21 bp, homo sapiens
aatatggaggcaccaaagtag

SEQ ID NO: 48083 - RNA, 21 nt, RNAi
uauggaggcaccaaaguaguu

SEQ ID NO: 48084 - RNA, 21 nt, RNAi
uuauaccuccgugguuucauc

SEQ ID NO: 48085 - DNA, 21 bp, homo sapiens
aaagtagttctagatgacaag

SEQ ID NO: 48086 - RNA, 21 nt, RNAi
aguaguucuagaugacaaguu

SEQ ID NO: 48087 - RNA, 21 nt, RNAi
uuucaucaagaucuacuguuc

SEQ ID NO: 48088 - DNA, 21 bp, homo sapiens
aagtagttctagatgacaagg

SEQ ID NO: 48089 - RNA, 21 nt, RNAi
guaguucuagaugacaagguu

SEQ ID NO: 48090 - RNA, 21 nt, RNAi
uucaucaagaucuacuguucc

SEQ ID NO: 48091 - DNA, 21 bp, homo sapiens
aagtacgtagactgaaataag

SEQ ID NO: 48092 - RNA, 21 nt, RNAi
guacguagacugaaauaaguu

SEQ ID NO: 48093 - RNA, 21 nt, RNAi
uucaugcaucugacuuuauuc

SEQ ID NO: 48094 - DNA, 21 bp, homo sapiens
aagtcactattgaaatggcat

SEQ ID NO: 48095 - RNA, 21 nt, RNAi
gucacuauugaaauggcauuu

SEQ ID NO: 48096 - RNA, 21 nt, RNAi
uucagugauaacuuuaccgua

SEQ ID NO: 48097 - DNA, 21 bp, homo sapiens
aaatggcatcaacatgatgct

SEQ ID NO: 48098 - RNA, 21 nt, RNAi
auggcaucaacaugaugcuuu

SEQ ID NO: 48099 - RNA, 21 nt, RNAi
uuuaccguaguuguacuacga

SEQ ID NO: 48100 - DNA, 21 bp, homo sapiens
aatggcatcaacatgatgctg

SEQ ID NO: 48101 - RNA, 21 nt, RNAi
uggcaucaacaugaugcuguu

SEQ ID NO: 48102 - RNA, 21 nt, RNAi
uuaccguaguuguacuacgac

SEQ ID NO: 48103 - DNA, 21 bp, homo sapiens
aagttctgaaatctttcgtca

SEQ ID NO: 48104 - RNA, 21 nt, RNAi
guucugaaaucuuucgucauu

SEQ ID NO: 48105 - RNA, 21 nt, RNAi
uucaagacuuuagaaagcagu

SEQ ID NO: 48106 - DNA, 21 bp, homo sapiens
aactaatgacatccagtgtct

SEQ ID NO: 48107 - RNA, 21 nt, RNAi
cuaaugacauccagugucuuu

SEQ ID NO: 48108 - RNA, 21 nt, RNAi
uugauuacuguaggucacaga

SEQ ID NO: 48109 - DNA, 21 bp, homo sapiens
aatgacatccagtgtctccaa

SEQ ID NO: 48110 - RNA, 21 nt, RNAi
ugacauccagugucuccaauu

SEQ ID NO: 48111 - RNA, 21 nt, RNAi
uuacuguaggucacagagguu

SEQ ID NO: 48112 - DNA, 21 bp, homo sapiens
cactagagcagagtacgagtc

SEQ ID NO: 48113 - RNA, 21 nt, RNAi
cuagagcagaguacgagucuu

SEQ ID NO: 48114 - RNA, 21 nt, RNAi
uugaucucgucucaugcucag

SEQ ID NO: 48115 - DNA, 21 bp, homo sapiens
cagagtacgagtctgaggcgg

SEQ ID NO: 48116 - RNA, 21 nt, RNAi
gaguacgagucugaggcgguu

SEQ ID NO: 48117 - RNA, 21 nt, RNAi
uucucaugcucagacuccgcc

SEQ ID NO: 48118 - DNA, 21 bp, homo sapiens
caggacaagcgtttagaaagt

SEQ ID NO: 48119 - RNA, 21 nt, RNAi
ggacaagcguuuagaaaguuu

SEQ ID NO: 48120 - RNA, 21 nt, RNAi
uuccuguucgcaaaucuuuca

SEQ ID NO: 48121 - DNA, 21 bp, homo sapiens
caagcgtttagaaagtttctt

SEQ ID NO: 48122 - RNA, 21 nt, RNAi
agcguuuagaaaguuucuuuu

SEQ ID NO: 48123 - RNA, 21 nt, RNAi
uuucgcaaaucuuucaaagaa

SEQ ID NO: 48124 - DNA, 21 bp, homo sapiens
cactctttgaccgagtattgg

SEQ ID NO: 48125 - RNA, 21 nt, RNAi
cucuuugaccgaguauugguu

SEQ ID NO: 48126 - RNA, 21 nt, RNAi
uugagaaacuggcucauaacc

SEQ ID NO: 48127 - DNA, 21 bp, homo sapiens
caaaggaggcattatgcttcc

SEQ ID NO: 48128 - RNA, 21 nt, RNAi
aaggaggcauuaugcuuccuu

SEQ ID NO: 48129 - RNA, 21 nt, RNAi
uuuuccuccguaauacgaagg

SEQ ID NO: 48130 - DNA, 21 bp, homo sapiens
caagcaacagtagtcgctgtt

SEQ ID NO: 48131 - RNA, 21 nt, RNAi
agcaacaguagucgcuguuuu

SEQ ID NO: 48132 - RNA, 21 nt, RNAi
uuucguugucaucagcgacaa

SEQ ID NO: 48133 - DNA, 21 bp, homo sapiens
caacagtagtcgctgttggat

SEQ ID NO: 48134 - RNA, 21 nt, RNAi
acaguagucgcuguuggauuu

SEQ ID NO: 48135 - RNA, 21 nt, RNAi
uuugucaucagcgacaaccua

SEQ ID NO: 48136 - DNA, 21 bp, homo sapiens
cagtagtcgctgttggatcgg

SEQ ID NO: 48137 - RNA, 21 nt, RNAi
guagucgcuguuggaucgguu

SEQ ID NO: 48138 - RNA, 21 nt, RNAi
uucaucagcgacaaccuagcc

SEQ ID NO: 48139 - DNA, 21 bp, homo sapiens
caaccagttagcgtgaaagtt

SEQ ID NO: 48140 - RNA, 21 nt, RNAi
accaguuagcgugaaaguuuu

SEQ ID NO: 48141 - RNA, 21 nt, RNAi
uuuggucaaucgcacuuucaa

SEQ ID NO: 48142 - DNA, 21 bp, homo sapiens
cagttagcgtgaaagttggag

SEQ ID NO: 48143 - RNA, 21 nt, RNAi
guuagcgugaaaguuggaguu

SEQ ID NO: 48144 - RNA, 21 nt, RNAi
uucaaucgcacuuucaaccuc

SEQ ID NO: 48145 - DNA, 21 bp, homo sapiens
cagaatatggaggcaccaaag

SEQ ID NO: 48146 - RNA, 21 nt, RNAi
gaauauggaggcaccaaaguu

SEQ ID NO: 48147 - RNA, 21 nt, RNAi
uucuuauaccuccgugguuuc

SEQ ID NO: 48148 - DNA, 21 bp, homo sapiens
caccaaagtagttctagatga

SEQ ID NO: 48149 - RNA, 21 nt, RNAi
ccaaaguaguucuagaugauu

SEQ ID NO: 48150 - RNA, 21 nt, RNAi
uugguuucaucaagaucuacu

SEQ ID NO: 48151 - DNA, 21 bp, homo sapiens
caaagtagttctagatgacaa

SEQ ID NO: 48152 - RNA, 21 nt, RNAi
aaguaguucuagaugacaauu

SEQ ID NO: 48153 - RNA, 21 nt, RNAi
uuuucaucaagaucuacuguu

SEQ ID NO: 48154 - DNA, 21 bp, homo sapiens
cattcttggaaagtacgtaga

SEQ ID NO: 48155 - RNA, 21 nt, RNAi
uucuuggaaaguacguagauu

SEQ ID NO: 48156 - RNA, 21 nt, RNAi
uuaagaaccuuucaugcaucu

SEQ ID NO: 48157 - DNA, 21 bp, homo sapiens
cactattgaaatggcatcaac

SEQ ID NO: 48158 - RNA, 21 nt, RNAi
cuauugaaauggcaucaacuu

SEQ ID NO: 48159 - RNA, 21 nt, RNAi
uugauaacuuuaccguaguug

SEQ ID NO: 48160 - DNA, 21 bp, homo sapiens
cattccactgaagttctgaaa

SEQ ID NO: 48161 - RNA, 21 nt, RNAi
uuccacugaaguucugaaauu

SEQ ID NO: 48162 - RNA, 21 nt, RNAi
uuaaggugacuucaagacuuu

SEQ ID NO: 48163 - DNA, 21 bp, homo sapiens
cactgaagttctgaaatcttt

SEQ ID NO: 48164 - RNA, 21 nt, RNAi
cugaaguucugaaaucuuuuu

SEQ ID NO: 48165 - RNA, 21 nt, RNAi
uugacuucaagacuuuagaaa

SEQ ID NO: 48166 - DNA, 21 bp, homo sapiens
gagcagagtacgagtctgagg

SEQ ID NO: 48167 - RNA, 21 nt, RNAi
gcagaguacgagucugagguu

SEQ ID NO: 48168 - RNA, 21 nt, RNAi
uucgucucaugcucagacucc

SEQ ID NO: 48169 - DNA, 21 bp, homo sapiens
gagtacgagtctgaggcggag

SEQ ID NO: 48170 - RNA, 21 nt, RNAi
guacgagucugaggcggaguu

SEQ ID NO: 48171 - RNA, 21 nt, RNAi
uucaugcucagacuccgccuc

SEQ ID NO: 48172 - DNA, 21 bp, homo sapiens
gagtaatggcaggacaagcgt

SEQ ID NO: 48173 - RNA, 21 nt, RNAi
guaauggcaggacaagcguuu

SEQ ID NO: 48174 - RNA, 21 nt, RNAi
uucauuaccguccuguucgca

SEQ ID NO: 48175 - DNA, 21 bp, homo sapiens
gacaagcgtttagaaagtttc

SEQ ID NO: 48176 - RNA, 21 nt, RNAi
caagcguuuagaaaguuucuu

SEQ ID NO: 48177 - RNA, 21 nt, RNAi
uuguucgcaaaucuuucaaag

SEQ ID NO: 48178 - DNA, 21 bp, homo sapiens
gaaagtttcttccactctttg

SEQ ID NO: 48179 - RNA, 21 nt, RNAi
aaguuucuuccacucuuuguu

SEQ ID NO: 48180 - RNA, 21 nt, RNAi
uuuucaaagaaggugagaaac

SEQ ID NO: 48181 - DNA, 21 bp, homo sapiens
gaccgagtattggttgaaagg

SEQ ID NO: 48182 - RNA, 21 nt, RNAi
ccgaguauugguugaaagguu

SEQ ID NO: 48183 - RNA, 21 nt, RNAi
uuggcucauaaccaacuuucc

SEQ ID NO: 48184 - DNA, 21 bp, homo sapiens
gagtattggttgaaaggagtg

SEQ ID NO: 48185 - RNA, 21 nt, RNAi
guauugguugaaaggaguguu

SEQ ID NO: 48186 - RNA, 21 nt, RNAi
uucauaaccaacuuuccucac

SEQ ID NO: 48187 - DNA, 21 bp, homo sapiens
gaaaggagtgctgctgaaact

SEQ ID NO: 48188 - RNA, 21 nt, RNAi
aaggagugcugcugaaacuuu

SEQ ID NO: 48189 - RNA, 21 nt, RNAi
uuuuccucacgacgacuuuga

SEQ ID NO: 48190 - DNA, 21 bp, homo sapiens
gagtgctgctgaaactgtaac

SEQ ID NO: 48191 - RNA, 21 nt, RNAi
gugcugcugaaacuguaacuu

SEQ ID NO: 48192 - RNA, 21 nt, RNAi
uucacgacgacuuugacauug

SEQ ID NO: 48193 - DNA, 21 bp, homo sapiens
gaaactgtaaccaaaggaggc

SEQ ID NO: 48194 - RNA, 21 nt, RNAi
aacuguaaccaaaggaggcuu

SEQ ID NO: 48195 - RNA, 21 nt, RNAi
uuuugacauugguuuccuccg

SEQ ID NO: 48196 - DNA, 21 bp, homo sapiens
gaggcattatgcttccagaaa

SEQ ID NO: 48197 - RNA, 21 nt, RNAi
ggcauuaugcuuccagaaauu

SEQ ID NO: 48198 - RNA, 21 nt, RNAi
uuccguaauacgaaggucuuu

SEQ ID NO: 48199 - DNA, 21 bp, homo sapiens
gagagattcaaccagttagcg

SEQ ID NO: 48200 - RNA, 21 nt, RNAi
gagauucaaccaguuagcguu

SEQ ID NO: 48201 - RNA, 21 nt, RNAi
uucucuaaguuggucaaucgc

SEQ ID NO: 48202 - DNA, 21 bp, homo sapiens
gagattcaaccagttagcgtg

SEQ ID NO: 48203 - RNA, 21 nt, RNAi
gauucaaccaguuagcguguu

SEQ ID NO: 48204 - RNA, 21 nt, RNAi
uucuaaguuggucaaucgcac

SEQ ID NO: 48205 - DNA, 21 bp, homo sapiens
gattcaaccagttagcgtgaa

SEQ ID NO: 48206 - RNA, 21 nt, RNAi
uucaaccaguuagcgugaauu

SEQ ID NO: 48207 - RNA, 21 nt, RNAi
uuaaguuggucaaucgcacuu

SEQ ID NO: 48208 - DNA, 21 bp, homo sapiens
gaaagttggagataaagttct

SEQ ID NO: 48209 - RNA, 21 nt, RNAi
aaguuggagauaaaguucuuu

SEQ ID NO: 48210 - RNA, 21 nt, RNAi
uuuucaaccucuauuucaaga

SEQ ID NO: 48211 - DNA, 21 bp, homo sapiens
gaatatggaggcaccaaagta

SEQ ID NO: 48212 - RNA, 21 nt, RNAi
auauggaggcaccaaaguauu

SEQ ID NO: 48213 - RNA, 21 nt, RNAi
uuuauaccuccgugguuucau

SEQ ID NO: 48214 - DNA, 21 bp, homo sapiens
gaggcaccaaagtagttctag

SEQ ID NO: 48215 - RNA, 21 nt, RNAi
ggcaccaaaguaguucuaguu

SEQ ID NO: 48216 - RNA, 21 nt, RNAi
uuccgugguuucaucaagauc

SEQ ID NO: 48217 - DNA, 21 bp, homo sapiens
gatgacaaggattatttccta

SEQ ID NO: 48218 - RNA, 21 nt, RNAi
ugacaaggauuauuuccuauu

SEQ ID NO: 48219 - RNA, 21 nt, RNAi
uuacuguuccuaauaaaggau

SEQ ID NO: 48220 - DNA, 21 bp, homo sapiens
gagatggtgacattcttggaa

SEQ ID NO: 48221 - RNA, 21 nt, RNAi
gauggugacauucuuggaauu

SEQ ID NO: 48222 - RNA, 21 nt, RNAi
uucuaccacuguaagaaccuu

SEQ ID NO: 48223 - DNA, 21 bp, homo sapiens
gatggtgacattcttggaaag

SEQ ID NO: 48224 - RNA, 21 nt, RNAi
uggugacauucuuggaaaguu

SEQ ID NO: 48225 - RNA, 21 nt, RNAi
uuaccacuguaagaaccuuuc

SEQ ID NO: 48226 - DNA, 21 bp, homo sapiens
gacattcttggaaagtacgta

SEQ ID NO: 48227 - RNA, 21 nt, RNAi
cauucuuggaaaguacguauu

SEQ ID NO: 48228 - RNA, 21 nt, RNAi
uuguaagaaccuuucaugcau

SEQ ID NO: 48229 - DNA, 21 bp, homo sapiens
gaaagtacgtagactgaaata

SEQ ID NO: 48230 - RNA, 21 nt, RNAi
aaguacguagacugaaauauu

SEQ ID NO: 48231 - RNA, 21 nt, RNAi
uuuucaugcaucugacuuuau

SEQ ID NO: 48232 - DNA, 21 bp, homo sapiens
gactgaaataagtcactattg

SEQ ID NO: 48233 - RNA, 21 nt, RNAi
cugaaauaagucacuauuguu

SEQ ID NO: 48234 - RNA, 21 nt, RNAi
uugacuuuauucagugauaac

SEQ ID NO: 48235 - DNA, 21 bp, homo sapiens
gaaatggcatcaacatgatgc

SEQ ID NO: 48236 - RNA, 21 nt, RNAi
aauggcaucaacaugaugcuu

SEQ ID NO: 48237 - RNA, 21 nt, RNAi
uuuuaccguaguuguacuacg

SEQ ID NO: 48238 - DNA, 21 bp, homo sapiens
gaagttctgaaatctttcgtc

SEQ ID NO: 48239 - RNA, 21 nt, RNAi
aguucugaaaucuuucgucuu

SEQ ID NO: 48240 - RNA, 21 nt, RNAi
uuucaagacuuuagaaagcag

SEQ ID NO: 48241 - DNA, 21 bp, homo sapiens
gataactaatgacatccagtg

SEQ ID NO: 48242 - RNA, 21 nt, RNAi
uaacuaaugacauccaguguu

SEQ ID NO: 48243 - RNA, 21 nt, RNAi
uuauugauuacuguaggucac

SEQ ID NO: 48244 - DNA, 21 bp, homo sapiens
tacactagagcagagtacgag

SEQ ID NO: 48245 - RNA, 21 nt, RNAi
cacuagagcagaguacgaguu

SEQ ID NO: 48246 - RNA, 21 nt, RNAi
uugugaucucgucucaugcuc

SEQ ID NO: 48247 - DNA, 21 bp, homo sapiens
tagagcagagtacgagtctga

SEQ ID NO: 48248 - RNA, 21 nt, RNAi
gagcagaguacgagucugauu

SEQ ID NO: 48249 - RNA, 21 nt, RNAi
uucucgucucaugcucagacu

SEQ ID NO: 48250 - DNA, 21 bp, homo sapiens
taatggcaggacaagcgttta

SEQ ID NO: 48251 - RNA, 21 nt, RNAi
auggcaggacaagcguuuauu

SEQ ID NO: 48252 - RNA, 21 nt, RNAi
uuuaccguccuguucgcaaau

SEQ ID NO: 48253 - DNA, 21 bp, homo sapiens
tagaaagtttcttccactctt

SEQ ID NO: 48254 - RNA, 21 nt, RNAi
gaaaguuucuuccacucuuuu

SEQ ID NO: 48255 - RNA, 21 nt, RNAi
uucuuucaaagaaggugagaa

SEQ ID NO: 48256 - DNA, 21 bp, homo sapiens
tattggttgaaaggagtgctg

SEQ ID NO: 48257 - RNA, 21 nt, RNAi
uugguugaaaggagugcuguu

SEQ ID NO: 48258 - RNA, 21 nt, RNAi
uuaaccaacuuuccucacgac

SEQ ID NO: 48259 - DNA, 21 bp, homo sapiens
taaccaaaggaggcattatgc

SEQ ID NO: 48260 - RNA, 21 nt, RNAi
accaaaggaggcauuaugcuu

SEQ ID NO: 48261 - RNA, 21 nt, RNAi
uuugguuuccuccguaauacg

SEQ ID NO: 48262 - DNA, 21 bp, homo sapiens
tattgcaagcaacagtagtcg

SEQ ID NO: 48263 - RNA, 21 nt, RNAi
uugcaagcaacaguagucguu

SEQ ID NO: 48264 - RNA, 21 nt, RNAi
uuaacguucguugucaucagc

SEQ ID NO: 48265 - DNA, 21 bp, homo sapiens
tagcgtgaaagttggagataa

SEQ ID NO: 48266 - RNA, 21 nt, RNAi
gcgugaaaguuggagauaauu

SEQ ID NO: 48267 - RNA, 21 nt, RNAi
uucgcacuuucaaccucuauu

SEQ ID NO: 48268 - DNA, 21 bp, homo sapiens
tatggaggcaccaaagtagtt

SEQ ID NO: 48269 - RNA, 21 nt, RNAi
uggaggcaccaaaguaguuuu

SEQ ID NO: 48270 - RNA, 21 nt, RNAi
uuaccuccgugguuucaucaa

SEQ ID NO: 48271 - DNA, 21 bp, homo sapiens
tagttctagatgacaaggatt

SEQ ID NO: 48272 - RNA, 21 nt, RNAi
guucuagaugacaaggauuuu

SEQ ID NO: 48273 - RNA, 21 nt, RNAi
uucaagaucuacuguuccuaa

SEQ ID NO: 48274 - DNA, 21 bp, homo sapiens
tagatgacaaggattatttcc

SEQ ID NO: 48275 - RNA, 21 nt, RNAi
gaugacaaggauuauuuccuu

SEQ ID NO: 48276 - RNA, 21 nt, RNAi
uucuacuguuccuaauaaagg

SEQ ID NO: 48277 - DNA, 21 bp, homo sapiens
tatttagagatggtgacattc

SEQ ID NO: 48278 - RNA, 21 nt, RNAi
uuuagagauggugacauucuu

SEQ ID NO: 48279 - RNA, 21 nt, RNAi
uuaaaucucuaccacuguaag

SEQ ID NO: 48280 - DNA, 21 bp, homo sapiens
tagagatggtgacattcttgg

SEQ ID NO: 48281 - RNA, 21 nt, RNAi
gagauggugacauucuugguu

SEQ ID NO: 48282 - RNA, 21 nt, RNAi
uucucuaccacuguaagaacc

SEQ ID NO: 48283 - DNA, 21 bp, homo sapiens
tacgtagactgaaataagtca

SEQ ID NO: 48284 - RNA, 21 nt, RNAi
cguagacugaaauaagucauu

SEQ ID NO: 48285 - RNA, 21 nt, RNAi
uugcaucugacuuuauucagu

SEQ ID NO: 48286 - DNA, 21 bp, homo sapiens
taagtcactattgaaatggca

SEQ ID NO: 48287 - RNA, 21 nt, RNAi
agucacuauugaaauggcauu

SEQ ID NO: 48288 - RNA, 21 nt, RNAi
uuucagugauaacuuuaccgu

SEQ ID NO: 48289 - DNA, 21 bp, homo sapiens
tattgaaatggcatcaacatg

SEQ ID NO: 48290 - RNA, 21 nt, RNAi
uugaaauggcaucaacauguu

SEQ ID NO: 48291 - RNA, 21 nt, RNAi
uuaacuuuaccguaguuguac

SEQ ID NO: 48292 - DNA, 21 bp, homo sapiens
taactaatgacatccagtgtc

SEQ ID NO: 48293 - RNA, 21 nt, RNAi
acuaaugacauccagugucuu

SEQ ID NO: 48294 - RNA, 21 nt, RNAi
uuugauuacuguaggucacag

SEQ ID NO: 48295 - DNA, 21 bp, homo sapiens
taatgacatccagtgtctcca

SEQ ID NO: 48296 - RNA, 21 nt, RNAi
augacauccagugucuccauu

SEQ ID NO: 48297 - RNA, 21 nt, RNAi
uuuacuguaggucacagaggu

SEQ ID NO: 48298 - DNA, 21 bp, homo sapiens
aaccagttagcgtgaaagttg

SEQ ID NO: 48299 - RNA, 21 nt, RNAi
ccaguuagcgugaaaguuguu

SEQ ID NO: 48300 - RNA, 21 nt, RNAi
uuggucaaucgcacuuucaac

SEQ ID NO: 48301 - DNA, 21 bp, homo sapiens
caaccagttagcgtgaaagtt

SEQ ID NO: 48302 - RNA, 21 nt, RNAi
accaguuagcgugaaaguuuu

SEQ ID NO: 48303 - RNA, 21 nt, RNAi
uuuggucaaucgcacuuucaa

SEQ ID NO: 48304 - DNA, 21 bp, homo sapiens
aagattcgatggacatggaca

SEQ ID NO: 48305 - RNA, 21 nt, RNAi
gauucgauggacauggacauu

SEQ ID NO: 48306 - RNA, 21 nt, RNAi
uucuaagcuaccuguaccugu

SEQ ID NO: 48307 - DNA, 21 bp, homo sapiens
aactaaaggccgacaaagatt

SEQ ID NO: 48308 - RNA, 21 nt, RNAi
cuaaaggccgacaaagauuuu

SEQ ID NO: 48309 - RNA, 21 nt, RNAi
uugauuuccggcuguuucuaa

SEQ ID NO: 48310 - DNA, 21 bp, homo sapiens
aaaggccgacaaagattatca

SEQ ID NO: 48311 - RNA, 21 nt, RNAi
aggccgacaaagauuaucauu

SEQ ID NO: 48312 - RNA, 21 nt, RNAi
uuuccggcuguuucuaauagu

SEQ ID NO: 48313 - DNA, 21 bp, homo sapiens
aaggccgacaaagattatcac

SEQ ID NO: 48314 - RNA, 21 nt, RNAi
ggccgacaaagauuaucacuu

SEQ ID NO: 48315 - RNA, 21 nt, RNAi
uuccggcuguuucuaauagug

SEQ ID NO: 48316 - DNA, 21 bp, homo sapiens
aagattatcactttaaggtgg

SEQ ID NO: 48317 - RNA, 21 nt, RNAi
gauuaucacuuuaaggugguu

SEQ ID NO: 48318 - RNA, 21 nt, RNAi
uucuaauagugaaauuccacc

SEQ ID NO: 48319 - DNA, 21 bp, homo sapiens
aaatgagcaccagttatcttt

SEQ ID NO: 48320 - RNA, 21 nt, RNAi
augagcaccaguuaucuuuuu

SEQ ID NO: 48321 - RNA, 21 nt, RNAi
uuuacucguggucaauagaaa

SEQ ID NO: 48322 - DNA, 21 bp, homo sapiens
aatgagcaccagttatcttta

SEQ ID NO: 48323 - RNA, 21 nt, RNAi
ugagcaccaguuaucuuuauu

SEQ ID NO: 48324 - RNA, 21 nt, RNAi
uuacucguggucaauagaaau

SEQ ID NO: 48325 - DNA, 21 bp, homo sapiens
aaaggatgagttgcacattgt

SEQ ID NO: 48326 - RNA, 21 nt, RNAi
aggaugaguugcacauuguuu

SEQ ID NO: 48327 - RNA, 21 nt, RNAi
uuuccuacucaacguguaaca

SEQ ID NO: 48328 - DNA, 21 bp, homo sapiens
aaggatgagttgcacattgtt

SEQ ID NO: 48329 - RNA, 21 nt, RNAi
ggaugaguugcacauuguuuu

SEQ ID NO: 48330 - RNA, 21 nt, RNAi
uuccuacucaacguguaacaa

SEQ ID NO: 48331 - DNA, 21 bp, homo sapiens
aagcagaggcaatgaattacg

SEQ ID NO: 48332 - RNA, 21 nt, RNAi
gcagaggcaaugaauuacguu

SEQ ID NO: 48333 - RNA, 21 nt, RNAi
uucgucuccguuacuuaaugc

SEQ ID NO: 48334 - DNA, 21 bp, homo sapiens
aatgaattacgaaggcagtcc

SEQ ID NO: 48335 - RNA, 21 nt, RNAi
ugaauuacgaaggcaguccuu

SEQ ID NO: 48336 - RNA, 21 nt, RNAi
uuacuuaaugcuuccgucagg

SEQ ID NO: 48337 - DNA, 21 bp, homo sapiens
aattacgaaggcagtccaatt

SEQ ID NO: 48338 - RNA, 21 nt, RNAi
uuacgaaggcaguccaauuuu

SEQ ID NO: 48339 - RNA, 21 nt, RNAi
uuaaugcuuccgucagguuaa

SEQ ID NO: 48340 - DNA, 21 bp, homo sapiens
aaggcagtccaattaaagtaa

SEQ ID NO: 48341 - RNA, 21 nt, RNAi
ggcaguccaauuaaaguaauu

SEQ ID NO: 48342 - RNA, 21 nt, RNAi
uuccgucagguuaauuucauu

SEQ ID NO: 48343 - DNA, 21 bp, homo sapiens
aattaaagtaacactggcaac

SEQ ID NO: 48344 - RNA, 21 nt, RNAi
uuaaaguaacacuggcaacuu

SEQ ID NO: 48345 - RNA, 21 nt, RNAi
uuaauuucauugugaccguug

SEQ ID NO: 48346 - DNA, 21 bp, homo sapiens
aaagtaacactggcaactttg

SEQ ID NO: 48347 - RNA, 21 nt, RNAi
aguaacacuggcaacuuuguu

SEQ ID NO: 48348 - RNA, 21 nt, RNAi
uuucauugugaccguugaaac

SEQ ID NO: 48349 - DNA, 21 bp, homo sapiens
aagtaacactggcaactttga

SEQ ID NO: 48350 - RNA, 21 nt, RNAi
guaacacuggcaacuuugauu

SEQ ID NO: 48351 - RNA, 21 nt, RNAi
uucauugugaccguugaaacu

SEQ ID NO: 48352 - DNA, 21 bp, homo sapiens
aaatgtctgtacagccaacgg

SEQ ID NO: 48353 - RNA, 21 nt, RNAi
augucuguacagccaacgguu

SEQ ID NO: 48354 - RNA, 21 nt, RNAi
uuuacagacaugucgguugcc

SEQ ID NO: 48355 - DNA, 21 bp, homo sapiens
aatgtctgtacagccaacggt

SEQ ID NO: 48356 - RNA, 21 nt, RNAi
ugucuguacagccaacgguuu

SEQ ID NO: 48357 - RNA, 21 nt, RNAi
uuacagacaugucgguugcca

SEQ ID NO: 48358 - DNA, 21 bp, homo sapiens
aaataacaccaccagtggtct

SEQ ID NO: 48359 - RNA, 21 nt, RNAi
auaacaccaccaguggucuuu

SEQ ID NO: 48360 - RNA, 21 nt, RNAi
uuuauugugguggucaccaga

SEQ ID NO: 48361 - DNA, 21 bp, homo sapiens
aataacaccaccagtggtctt

SEQ ID NO: 48362 - RNA, 21 nt, RNAi
uaacaccaccaguggucuuuu

SEQ ID NO: 48363 - RNA, 21 nt, RNAi
uuauugugguggucaccagaa

SEQ ID NO: 48364 - DNA, 21 bp, homo sapiens
aacaccaccagtggtcttaag

SEQ ID NO: 48365 - RNA, 21 nt, RNAi
caccaccaguggucuuaaguu

SEQ ID NO: 48366 - RNA, 21 nt, RNAi
uugugguggucaccagaauuc

SEQ ID NO: 48367 - DNA, 21 bp, homo sapiens
aaggttgaagtgtggttcagg

SEQ ID NO: 48368 - RNA, 21 nt, RNAi
gguugaagugugguucagguu

SEQ ID NO: 48369 - RNA, 21 nt, RNAi
uuccaacuucacaccaagucc

SEQ ID NO: 48370 - DNA, 21 bp, homo sapiens
aagatgcagagtcagaagatg

SEQ ID NO: 48371 - RNA, 21 nt, RNAi
gaugcagagucagaagauguu

SEQ ID NO: 48372 - RNA, 21 nt, RNAi
uucuacgucucagucuucuac

SEQ ID NO: 48373 - DNA, 21 bp, homo sapiens
aagatgaagaggaggaggatg

SEQ ID NO: 48374 - RNA, 21 nt, RNAi
gaugaagaggaggaggauguu

SEQ ID NO: 48375 - RNA, 21 nt, RNAi
uucuacuucuccuccuccuac

SEQ ID NO: 48376 - DNA, 21 bp, homo sapiens
aagaggaggaggatgtgaaac

SEQ ID NO: 48377 - RNA, 21 nt, RNAi
gaggaggaggaugugaaacuu

SEQ ID NO: 48378 - RNA, 21 nt, RNAi
uucuccuccuccuacacuuug

SEQ ID NO: 48379 - DNA, 21 bp, homo sapiens
aagtatatctggaaagcggtc

SEQ ID NO: 48380 - RNA, 21 nt, RNAi
guauaucuggaaagcggucuu

SEQ ID NO: 48381 - RNA, 21 nt, RNAi
uucauauagaccuuucgccag

SEQ ID NO: 48382 - DNA, 21 bp, homo sapiens
aaacttgctgctgatgaagat

SEQ ID NO: 48383 - RNA, 21 nt, RNAi
acuugcugcugaugaagauuu

SEQ ID NO: 48384 - RNA, 21 nt, RNAi
uuugaacgacgacuacuucua

SEQ ID NO: 48385 - DNA, 21 bp, homo sapiens
aacttgctgctgatgaagatg

SEQ ID NO: 48386 - RNA, 21 nt, RNAi
cuugcugcugaugaagauguu

SEQ ID NO: 48387 - RNA, 21 nt, RNAi
uugaacgacgacuacuucuac

SEQ ID NO: 48388 - DNA, 21 bp, homo sapiens
aagatgatgacgatgatgatg

SEQ ID NO: 48389 - RNA, 21 nt, RNAi
gaugaugacgaugaugauguu

SEQ ID NO: 48390 - RNA, 21 nt, RNAi
uucuacuacugcuacuacuac

SEQ ID NO: 48391 - DNA, 21 bp, homo sapiens
aagaggatgatgatgaagatg

SEQ ID NO: 48392 - RNA, 21 nt, RNAi
gaggaugaugaugaagauguu

SEQ ID NO: 48393 - RNA, 21 nt, RNAi
uucuccuacuacuacuucuac

SEQ ID NO: 48394 - DNA, 21 bp, homo sapiens
aaagcgccagtgaagaaatct

SEQ ID NO: 48395 - RNA, 21 nt, RNAi
agcgccagugaagaaaucuuu

SEQ ID NO: 48396 - RNA, 21 nt, RNAi
uuucgcggucacuucuuuaga

SEQ ID NO: 48397 - DNA, 21 bp, homo sapiens
aagcgccagtgaagaaatcta

SEQ ID NO: 48398 - RNA, 21 nt, RNAi
gcgccagugaagaaaucuauu

SEQ ID NO: 48399 - RNA, 21 nt, RNAi
uucgcggucacuucuuuagau

SEQ ID NO: 48400 - DNA, 21 bp, homo sapiens
aaatctatacgagatactcca

SEQ ID NO: 48401 - RNA, 21 nt, RNAi
aucuauacgagauacuccauu

SEQ ID NO: 48402 - RNA, 21 nt, RNAi
uuuagauaugcucuaugaggu

SEQ ID NO: 48403 - DNA, 21 bp, homo sapiens
aatctatacgagatactccag

SEQ ID NO: 48404 - RNA, 21 nt, RNAi
ucuauacgagauacuccaguu

SEQ ID NO: 48405 - RNA, 21 nt, RNAi
uuagauaugcucuaugagguc

SEQ ID NO: 48406 - DNA, 21 bp, homo sapiens
aaaccatcatcaacaccaaga

SEQ ID NO: 48407 - RNA, 21 nt, RNAi
accaucaucaacaccaagauu

SEQ ID NO: 48408 - RNA, 21 nt, RNAi
uuugguaguaguugugguucu

SEQ ID NO: 48409 - DNA, 21 bp, homo sapiens
aaccatcatcaacaccaagat

SEQ ID NO: 48410 - RNA, 21 nt, RNAi
ccaucaucaacaccaagauuu

SEQ ID NO: 48411 - RNA, 21 nt, RNAi
uugguaguaguugugguucua

SEQ ID NO: 48412 - DNA, 21 bp, homo sapiens
aaaggacaagaatccttcaag

SEQ ID NO: 48413 - RNA, 21 nt, RNAi
aggacaagaauccuucaaguu

SEQ ID NO: 48414 - RNA, 21 nt, RNAi
uuuccuguucuuaggaaguuc

SEQ ID NO: 48415 - DNA, 21 bp, homo sapiens
aaggacaagaatccttcaaga

SEQ ID NO: 48416 - RNA, 21 nt, RNAi
ggacaagaauccuucaagauu

SEQ ID NO: 48417 - RNA, 21 nt, RNAi
uuccuguucuuaggaaguucu

SEQ ID NO: 48418 - DNA, 21 bp, homo sapiens
aagaatccttcaagaaacagg

SEQ ID NO: 48419 - RNA, 21 nt, RNAi
gaauccuucaagaaacagguu

SEQ ID NO: 48420 - RNA, 21 nt, RNAi
uucuuaggaaguucuuugucc

SEQ ID NO: 48421 - DNA, 21 bp, homo sapiens
aatccttcaagaaacaggaaa

SEQ ID NO: 48422 - RNA, 21 nt, RNAi
uccuucaagaaacaggaaauu

SEQ ID NO: 48423 - RNA, 21 nt, RNAi
uuaggaaguucuuuguccuuu

SEQ ID NO: 48424 - DNA, 21 bp, homo sapiens
aaaggacctagttctgtagaa

SEQ ID NO: 48425 - RNA, 21 nt, RNAi
aggaccuaguucuguagaauu

SEQ ID NO: 48426 - RNA, 21 nt, RNAi
uuuccuggaucaagacaucuu

SEQ ID NO: 48427 - DNA, 21 bp, homo sapiens
aaggacctagttctgtagaag

SEQ ID NO: 48428 - RNA, 21 nt, RNAi
ggaccuaguucuguagaaguu

SEQ ID NO: 48429 - RNA, 21 nt, RNAi
uuccuggaucaagacaucuuc

SEQ ID NO: 48430 - DNA, 21 bp, homo sapiens
aaagtggaagccaaattcatc

SEQ ID NO: 48431 - RNA, 21 nt, RNAi
aguggaagccaaauucaucuu

SEQ ID NO: 48432 - RNA, 21 nt, RNAi
uuucaccuucgguuuaaguag

SEQ ID NO: 48433 - DNA, 21 bp, homo sapiens
aagtggaagccaaattcatca

SEQ ID NO: 48434 - RNA, 21 nt, RNAi
guggaagccaaauucaucauu

SEQ ID NO: 48435 - RNA, 21 nt, RNAi
uucaccuucgguuuaaguagu

SEQ ID NO: 48436 - DNA, 21 bp, homo sapiens
aagaattgcttccggatgact

SEQ ID NO: 48437 - RNA, 21 nt, RNAi
gaauugcuuccggaugacuuu

SEQ ID NO: 48438 - RNA, 21 nt, RNAi
uucuuaacgaaggccuacuga

SEQ ID NO: 48439 - DNA, 21 bp, homo sapiens
aattgcttccggatgactgac

SEQ ID NO: 48440 - RNA, 21 nt, RNAi
uugcuuccggaugacugacuu

SEQ ID NO: 48441 - RNA, 21 nt, RNAi
uuaacgaaggccuacugacug

SEQ ID NO: 48442 - DNA, 21 bp, homo sapiens
aagaggctattcaagatctct

SEQ ID NO: 48443 - RNA, 21 nt, RNAi
gaggcuauucaagaucucuuu

SEQ ID NO: 48444 - RNA, 21 nt, RNAi
uucuccgauaaguucuagaga

SEQ ID NO: 48445 - DNA, 21 bp, homo sapiens
aagatctctggcagtggagga

SEQ ID NO: 48446 - RNA, 21 nt, RNAi
gaucucuggcaguggaggauu

SEQ ID NO: 48447 - RNA, 21 nt, RNAi
uucuagagaccgucaccuccu

SEQ ID NO: 48448 - DNA, 21 bp, homo sapiens
aacagttgatatctggctgtc

SEQ ID NO: 48449 - RNA, 21 nt, RNAi
caguugauaucuggcugucuu

SEQ ID NO: 48450 - RNA, 21 nt, RNAi
uugucaacuauagaccgacag

SEQ ID NO: 48451 - DNA, 21 bp, homo sapiens
aatgcagagtgagaactttcc

SEQ ID NO: 48452 - RNA, 21 nt, RNAi
ugcagagugagaacuuuccuu

SEQ ID NO: 48453 - RNA, 21 nt, RNAi
uuacgucucacucuugaaagg

SEQ ID NO: 48454 - DNA, 21 bp, homo sapiens
aaatgttgtccaggttctatt

SEQ ID NO: 48455 - RNA, 21 nt, RNAi
auguuguccagguucuauuuu

SEQ ID NO: 48456 - RNA, 21 nt, RNAi
uuuacaacagguccaagauaa

SEQ ID NO: 48457 - DNA, 21 bp, homo sapiens
aatgttgtccaggttctattg

SEQ ID NO: 48458 - RNA, 21 nt, RNAi
uguuguccagguucuauuguu

SEQ ID NO: 48459 - RNA, 21 nt, RNAi
uuacaacagguccaagauaac

SEQ ID NO: 48460 - DNA, 21 bp, homo sapiens
cactttaaggtggataatgat

SEQ ID NO: 48461 - RNA, 21 nt, RNAi
cuuuaagguggauaaugauuu

SEQ ID NO: 48462 - RNA, 21 nt, RNAi
uugaaauuccaccuauuacua

SEQ ID NO: 48463 - DNA, 21 bp, homo sapiens
caccagttatctttaagaacg

SEQ ID NO: 48464 - RNA, 21 nt, RNAi
ccaguuaucuuuaagaacguu

SEQ ID NO: 48465 - RNA, 21 nt, RNAi
uuggucaauagaaauucuugc

SEQ ID NO: 48466 - DNA, 21 bp, homo sapiens
cagttatctttaagaacggtc

SEQ ID NO: 48467 - RNA, 21 nt, RNAi
guuaucuuuaagaacggucuu

SEQ ID NO: 48468 - RNA, 21 nt, RNAi
uucaauagaaauucuugccag

SEQ ID NO: 48469 - DNA, 21 bp, homo sapiens
caaaggatgagttgcacattg

SEQ ID NO: 48470 - RNA, 21 nt, RNAi
aaggaugaguugcacauuguu

SEQ ID NO: 48471 - RNA, 21 nt, RNAi
uuuuccuacucaacguguaac

SEQ ID NO: 48472 - DNA, 21 bp, homo sapiens
cacattgttgaagcagaggca

SEQ ID NO: 48473 - RNA, 21 nt, RNAi
cauuguugaagcagaggcauu

SEQ ID NO: 48474 - RNA, 21 nt, RNAi
uuguaacaacuucgucuccgu

SEQ ID NO: 48475 - DNA, 21 bp, homo sapiens
cattgttgaagcagaggcaat

SEQ ID NO: 48476 - RNA, 21 nt, RNAi
uuguugaagcagaggcaauuu

SEQ ID NO: 48477 - RNA, 21 nt, RNAi
uuaacaacuucgucuccguua

SEQ ID NO: 48478 - DNA, 21 bp, homo sapiens
cagaggcaatgaattacgaag

SEQ ID NO: 48479 - RNA, 21 nt, RNAi
gaggcaaugaauuacgaaguu

SEQ ID NO: 48480 - RNA, 21 nt, RNAi
uucuccguuacuuaaugcuuc

SEQ ID NO: 48481 - DNA, 21 bp, homo sapiens
caatgaattacgaaggcagtc

SEQ ID NO: 48482 - RNA, 21 nt, RNAi
augaauuacgaaggcagucuu

SEQ ID NO: 48483 - RNA, 21 nt, RNAi
uuuacuuaaugcuuccgucag

SEQ ID NO: 48484 - DNA, 21 bp, homo sapiens
cagtccaattaaagtaacact

SEQ ID NO: 48485 - RNA, 21 nt, RNAi
guccaauuaaaguaacacuuu

SEQ ID NO: 48486 - RNA, 21 nt, RNAi
uucagguuaauuucauuguga

SEQ ID NO: 48487 - DNA, 21 bp, homo sapiens
caattaaagtaacactggcaa

SEQ ID NO: 48488 - RNA, 21 nt, RNAi
auuaaaguaacacuggcaauu

SEQ ID NO: 48489 - RNA, 21 nt, RNAi
uuuaauuucauugugaccguu

SEQ ID NO: 48490 - DNA, 21 bp, homo sapiens
caccaccagtggtcttaaggt

SEQ ID NO: 48491 - RNA, 21 nt, RNAi
ccaccaguggucuuaagguuu

SEQ ID NO: 48492 - RNA, 21 nt, RNAi
uugguggucaccagaauucca

SEQ ID NO: 48493 - DNA, 21 bp, homo sapiens
caccagtggtcttaaggttga

SEQ ID NO: 48494 - RNA, 21 nt, RNAi
ccaguggucuuaagguugauu

SEQ ID NO: 48495 - RNA, 21 nt, RNAi
uuggucaccagaauuccaacu

SEQ ID NO: 48496 - DNA, 21 bp, homo sapiens
cagtggtcttaaggttgaagt

SEQ ID NO: 48497 - RNA, 21 nt, RNAi
guggucuuaagguugaaguuu

SEQ ID NO: 48498 - RNA, 21 nt, RNAi
uucaccagaauuccaacuuca

SEQ ID NO: 48499 - DNA, 21 bp, homo sapiens
cagtgcatattagtggacagc

SEQ ID NO: 48500 - RNA, 21 nt, RNAi
gugcauauuaguggacagcuu

SEQ ID NO: 48501 - RNA, 21 nt, RNAi
uucacguauaaucaccugucg

SEQ ID NO: 48502 - DNA, 21 bp, homo sapiens
catattagtggacagcactta

SEQ ID NO: 48503 - RNA, 21 nt, RNAi
uauuaguggacagcacuuauu

SEQ ID NO: 48504 - RNA, 21 nt, RNAi
uuauaaucaccugucgugaau

SEQ ID NO: 48505 - DNA, 21 bp, homo sapiens
cagcacttagtagctgtggag

SEQ ID NO: 48506 - RNA, 21 nt, RNAi
gcacuuaguagcuguggaguu

SEQ ID NO: 48507 - RNA, 21 nt, RNAi
uucgugaaucaucgacaccuc

SEQ ID NO: 48508 - DNA, 21 bp, homo sapiens
cacttagtagctgtggaggaa

SEQ ID NO: 48509 - RNA, 21 nt, RNAi
cuuaguagcuguggaggaauu

SEQ ID NO: 48510 - RNA, 21 nt, RNAi
uugaaucaucgacaccuccuu

SEQ ID NO: 48511 - DNA, 21 bp, homo sapiens
cagagtcagaagatgaagagg

SEQ ID NO: 48512 - RNA, 21 nt, RNAi
gagucagaagaugaagagguu

SEQ ID NO: 48513 - RNA, 21 nt, RNAi
uucucagucuucuacuucucc

SEQ ID NO: 48514 - DNA, 21 bp, homo sapiens
cagaagatgaagaggaggagg

SEQ ID NO: 48515 - RNA, 21 nt, RNAi
gaagaugaagaggaggagguu

SEQ ID NO: 48516 - RNA, 21 nt, RNAi
uucuucuacuucuccuccucc

SEQ ID NO: 48517 - DNA, 21 bp, homo sapiens
cagtgaagaaatctatacgag

SEQ ID NO: 48518 - RNA, 21 nt, RNAi
gugaagaaaucuauacgaguu

SEQ ID NO: 48519 - RNA, 21 nt, RNAi
uucacuucuuuagauaugcuc

SEQ ID NO: 48520 - DNA, 21 bp, homo sapiens
catcatcaacaccaagatcaa

SEQ ID NO: 48521 - RNA, 21 nt, RNAi
ucaucaacaccaagaucaauu

SEQ ID NO: 48522 - RNA, 21 nt, RNAi
uuaguaguugugguucuaguu

SEQ ID NO: 48523 - DNA, 21 bp, homo sapiens
caagaatccttcaagaaacag

SEQ ID NO: 48524 - RNA, 21 nt, RNAi
agaauccuucaagaaacaguu

SEQ ID NO: 48525 - RNA, 21 nt, RNAi
uuucuuaggaaguucuuuguc

SEQ ID NO: 48526 - DNA, 21 bp, homo sapiens
caaagtggaagccaaattcat

SEQ ID NO: 48527 - RNA, 21 nt, RNAi
aaguggaagccaaauucauuu

SEQ ID NO: 48528 - RNA, 21 nt, RNAi
uuuucaccuucgguuuaagua

SEQ ID NO: 48529 - DNA, 21 bp, homo sapiens
caagaggctattcaagatctc

SEQ ID NO: 48530 - RNA, 21 nt, RNAi
agaggcuauucaagaucucuu

SEQ ID NO: 48531 - RNA, 21 nt, RNAi
uuucuccgauaaguucuagag

SEQ ID NO: 48532 - DNA, 21 bp, homo sapiens
caagatctctggcagtggagg

SEQ ID NO: 48533 - RNA, 21 nt, RNAi
agaucucuggcaguggagguu

SEQ ID NO: 48534 - RNA, 21 nt, RNAi
uuucuagagaccgucaccucc

SEQ ID NO: 48535 - DNA, 21 bp, homo sapiens
cagtggaggaagtctctttaa

SEQ ID NO: 48536 - RNA, 21 nt, RNAi
guggaggaagucucuuuaauu

SEQ ID NO: 48537 - RNA, 21 nt, RNAi
uucaccuccuucagagaaauu

SEQ ID NO: 48538 - DNA, 21 bp, homo sapiens
cagttgatatctggctgtcct

SEQ ID NO: 48539 - RNA, 21 nt, RNAi
guugauaucuggcuguccuuu

SEQ ID NO: 48540 - RNA, 21 nt, RNAi
uucaacuauagaccgacagga

SEQ ID NO: 48541 - DNA, 21 bp, homo sapiens
caggttctattgccaagaatg

SEQ ID NO: 48542 - RNA, 21 nt, RNAi
gguucuauugccaagaauguu

SEQ ID NO: 48543 - RNA, 21 nt, RNAi
uuccaagauaacgguucuuac

SEQ ID NO: 48544 - DNA, 21 bp, homo sapiens
catagtagtagcggtggtcag

SEQ ID NO: 48545 - RNA, 21 nt, RNAi
uaguaguagcgguggucaguu

SEQ ID NO: 48546 - RNA, 21 nt, RNAi
uuaucaucaucgccaccaguc

SEQ ID NO: 48547 - DNA, 21 bp, homo sapiens
gattccgtcctgcgcggttgt

SEQ ID NO: 48548 - RNA, 21 nt, RNAi
uuccguccugcgcgguuguuu

SEQ ID NO: 48549 - RNA, 21 nt, RNAi
uuaaggcaggacgcgccaaca

SEQ ID NO: 48550 - DNA, 21 bp, homo sapiens
gatggaagattcgatggacat

SEQ ID NO: 48551 - RNA, 21 nt, RNAi
uggaagauucgauggacauuu

SEQ ID NO: 48552 - RNA, 21 nt, RNAi
uuaccuucuaagcuaccugua

SEQ ID NO: 48553 - DNA, 21 bp, homo sapiens
gaagattcgatggacatggac

SEQ ID NO: 48554 - RNA, 21 nt, RNAi
agauucgauggacauggacuu

SEQ ID NO: 48555 - RNA, 21 nt, RNAi
uuucuaagcuaccuguaccug

SEQ ID NO: 48556 - DNA, 21 bp, homo sapiens
gattcgatggacatggacatg

SEQ ID NO: 48557 - RNA, 21 nt, RNAi
uucgauggacauggacauguu

SEQ ID NO: 48558 - RNA, 21 nt, RNAi
uuaagcuaccuguaccuguac

SEQ ID NO: 48559 - DNA, 21 bp, homo sapiens
gaactaaaggccgacaaagat

SEQ ID NO: 48560 - RNA, 21 nt, RNAi
acuaaaggccgacaaagauuu

SEQ ID NO: 48561 - RNA, 21 nt, RNAi
uuugauuuccggcuguuucua

SEQ ID NO: 48562 - DNA, 21 bp, homo sapiens
gattatcactttaaggtggat

SEQ ID NO: 48563 - RNA, 21 nt, RNAi
uuaucacuuuaagguggauuu

SEQ ID NO: 48564 - RNA, 21 nt, RNAi
uuaauagugaaauuccaccua

SEQ ID NO: 48565 - DNA, 21 bp, homo sapiens
gagcaccagttatctttaaga

SEQ ID NO: 48566 - RNA, 21 nt, RNAi
gcaccaguuaucuuuaagauu

SEQ ID NO: 48567 - RNA, 21 nt, RNAi
uucguggucaauagaaauucu

SEQ ID NO: 48568 - DNA, 21 bp, homo sapiens
gatgagttgcacattgttgaa

SEQ ID NO: 48569 - RNA, 21 nt, RNAi
ugaguugcacauuguugaauu

SEQ ID NO: 48570 - RNA, 21 nt, RNAi
uuacucaacguguaacaacuu

SEQ ID NO: 48571 - DNA, 21 bp, homo sapiens
gagttgcacattgttgaagca

SEQ ID NO: 48572 - RNA, 21 nt, RNAi
guugcacauuguugaagcauu

SEQ ID NO: 48573 - RNA, 21 nt, RNAi
uucaacguguaacaacuucgu

SEQ ID NO: 48574 - DNA, 21 bp, homo sapiens
gaagcagaggcaatgaattac

SEQ ID NO: 48575 - RNA, 21 nt, RNAi
agcagaggcaaugaauuacuu

SEQ ID NO: 48576 - RNA, 21 nt, RNAi
uuucgucuccguuacuuaaug

SEQ ID NO: 48577 - DNA, 21 bp, homo sapiens
gaggcaatgaattacgaaggc

SEQ ID NO: 48578 - RNA, 21 nt, RNAi
ggcaaugaauuacgaaggcuu

SEQ ID NO: 48579 - RNA, 21 nt, RNAi
uuccguuacuuaaugcuuccg

SEQ ID NO: 48580 - DNA, 21 bp, homo sapiens
gaattacgaaggcagtccaat

SEQ ID NO: 48581 - RNA, 21 nt, RNAi
auuacgaaggcaguccaauuu

SEQ ID NO: 48582 - RNA, 21 nt, RNAi
uuuaaugcuuccgucagguua

SEQ ID NO: 48583 - DNA, 21 bp, homo sapiens
gaaggcagtccaattaaagta

SEQ ID NO: 48584 - RNA, 21 nt, RNAi
aggcaguccaauuaaaguauu

SEQ ID NO: 48585 - RNA, 21 nt, RNAi
uuuccgucagguuaauuucau

SEQ ID NO: 48586 - DNA, 21 bp, homo sapiens
gaaataacaccaccagtggtc

SEQ ID NO: 48587 - RNA, 21 nt, RNAi
aauaacaccaccaguggucuu

SEQ ID NO: 48588 - RNA, 21 nt, RNAi
uuuuauugugguggucaccag

SEQ ID NO: 48589 - DNA, 21 bp, homo sapiens
gacagcacttagtagctgtgg

SEQ ID NO: 48590 - RNA, 21 nt, RNAi
cagcacuuaguagcugugguu

SEQ ID NO: 48591 - RNA, 21 nt, RNAi
uugucgugaaucaucgacacc

SEQ ID NO: 48592 - DNA, 21 bp, homo sapiens
gaggaagatgcagagtcagaa

SEQ ID NO: 48593 - RNA, 21 nt, RNAi
ggaagaugcagagucagaauu

SEQ ID NO: 48594 - RNA, 21 nt, RNAi
uuccuucuacgucucagucuu

SEQ ID NO: 48595 - DNA, 21 bp, homo sapiens
gaagatgcagagtcagaagat

SEQ ID NO: 48596 - RNA, 21 nt, RNAi
agaugcagagucagaagauuu

SEQ ID NO: 48597 - RNA, 21 nt, RNAi
uuucuacgucucagucuucua

SEQ ID NO: 48598 - DNA, 21 bp, homo sapiens
gatgcagagtcagaagatgaa

SEQ ID NO: 48599 - RNA, 21 nt, RNAi
ugcagagucagaagaugaauu

SEQ ID NO: 48600 - RNA, 21 nt, RNAi
uuacgucucagucuucuacuu

SEQ ID NO: 48601 - DNA, 21 bp, homo sapiens
gagtcagaagatgaagaggag

SEQ ID NO: 48602 - RNA, 21 nt, RNAi
gucagaagaugaagaggaguu

SEQ ID NO: 48603 - RNA, 21 nt, RNAi
uucagucuucuacuucuccuc

SEQ ID NO: 48604 - DNA, 21 bp, homo sapiens
gaagatgaagaggaggaggat

SEQ ID NO: 48605 - RNA, 21 nt, RNAi
agaugaagaggaggaggauuu

SEQ ID NO: 48606 - RNA, 21 nt, RNAi
uuucuacuucuccuccuccua

SEQ ID NO: 48607 - DNA, 21 bp, homo sapiens
gatgaagaggaggaggatgtg

SEQ ID NO: 48608 - RNA, 21 nt, RNAi
ugaagaggaggaggauguguu

SEQ ID NO: 48609 - RNA, 21 nt, RNAi
uuacuucuccuccuccuacac

SEQ ID NO: 48610 - DNA, 21 bp, homo sapiens
gaagaggaggaggatgtgaaa

SEQ ID NO: 48611 - RNA, 21 nt, RNAi
agaggaggaggaugugaaauu

SEQ ID NO: 48612 - RNA, 21 nt, RNAi
uuucuccuccuccuacacuuu

SEQ ID NO: 48613 - DNA, 21 bp, homo sapiens
gaggaggaggatgtgaaactc

SEQ ID NO: 48614 - RNA, 21 nt, RNAi
ggaggaggaugugaaacucuu

SEQ ID NO: 48615 - RNA, 21 nt, RNAi
uuccuccuccuacacuuugag

SEQ ID NO: 48616 - DNA, 21 bp, homo sapiens
gaggaggatgtgaaactctta

SEQ ID NO: 48617 - RNA, 21 nt, RNAi
ggaggaugugaaacucuuauu

SEQ ID NO: 48618 - RNA, 21 nt, RNAi
uuccuccuacacuuugagaau

SEQ ID NO: 48619 - DNA, 21 bp, homo sapiens
gaggatgtgaaactcttaagt

SEQ ID NO: 48620 - RNA, 21 nt, RNAi
ggaugugaaacucuuaaguuu

SEQ ID NO: 48621 - RNA, 21 nt, RNAi
uuccuacacuuugagaauuca

SEQ ID NO: 48622 - DNA, 21 bp, homo sapiens
gaaactcttaagtatatctgg

SEQ ID NO: 48623 - RNA, 21 nt, RNAi
aacucuuaaguauaucugguu

SEQ ID NO: 48624 - RNA, 21 nt, RNAi
uuuugagaauucauauagacc

SEQ ID NO: 48625 - DNA, 21 bp, homo sapiens
gaggtggtagcaaggttccac

SEQ ID NO: 48626 - RNA, 21 nt, RNAi
ggugguagcaagguuccacuu

SEQ ID NO: 48627 - RNA, 21 nt, RNAi
uuccaccaucguuccaaggug

SEQ ID NO: 48628 - DNA, 21 bp, homo sapiens
gatgaagatgatgacgatgat

SEQ ID NO: 48629 - RNA, 21 nt, RNAi
ugaagaugaugacgaugauuu

SEQ ID NO: 48630 - RNA, 21 nt, RNAi
uuacuucuacuacugcuacua

SEQ ID NO: 48631 - DNA, 21 bp, homo sapiens
gaagatgatgacgatgatgat

SEQ ID NO: 48632 - RNA, 21 nt, RNAi
agaugaugacgaugaugauuu

SEQ ID NO: 48633 - RNA, 21 nt, RNAi
uuucuacuacugcuacuacua

SEQ ID NO: 48634 - DNA, 21 bp, homo sapiens
gatgatgacgatgatgatgaa

SEQ ID NO: 48635 - RNA, 21 nt, RNAi
ugaugacgaugaugaugaauu

SEQ ID NO: 48636 - RNA, 21 nt, RNAi
uuacuacugcuacuacuacuu

SEQ ID NO: 48637 - DNA, 21 bp, homo sapiens
gatgacgatgatgatgaagag

SEQ ID NO: 48638 - RNA, 21 nt, RNAi
ugacgaugaugaugaagaguu

SEQ ID NO: 48639 - RNA, 21 nt, RNAi
uuacugcuacuacuacuucuc

SEQ ID NO: 48640 - DNA, 21 bp, homo sapiens
gacgatgatgatgaagaggat

SEQ ID NO: 48641 - RNA, 21 nt, RNAi
cgaugaugaugaagaggauuu

SEQ ID NO: 48642 - RNA, 21 nt, RNAi
uugcuacuacuacuucuccua

SEQ ID NO: 48643 - DNA, 21 bp, homo sapiens
gatgatgatgaagaggatgat

SEQ ID NO: 48644 - RNA, 21 nt, RNAi
ugaugaugaagaggaugauuu

SEQ ID NO: 48645 - RNA, 21 nt, RNAi
uuacuacuacuucuccuacua

SEQ ID NO: 48646 - DNA, 21 bp, homo sapiens
gatgatgaagaggatgatgat

SEQ ID NO: 48647 - RNA, 21 nt, RNAi
ugaugaagaggaugaugauuu

SEQ ID NO: 48648 - RNA, 21 nt, RNAi
uuacuacuucuccuacuacua

SEQ ID NO: 48649 - DNA, 21 bp, homo sapiens
gatgaagaggatgatgatgaa

SEQ ID NO: 48650 - RNA, 21 nt, RNAi
ugaagaggaugaugaugaauu

SEQ ID NO: 48651 - RNA, 21 nt, RNAi
uuacuucuccuacuacuacuu

SEQ ID NO: 48652 - DNA, 21 bp, homo sapiens
gaagaggatgatgatgaagat

SEQ ID NO: 48653 - RNA, 21 nt, RNAi
agaggaugaugaugaagauuu

SEQ ID NO: 48654 - RNA, 21 nt, RNAi
uuucuccuacuacuacuucua

SEQ ID NO: 48655 - DNA, 21 bp, homo sapiens
gaggatgatgatgaagatgat

SEQ ID NO: 48656 - RNA, 21 nt, RNAi
ggaugaugaugaagaugauuu

SEQ ID NO: 48657 - RNA, 21 nt, RNAi
uuccuacuacuacuucuacua

SEQ ID NO: 48658 - DNA, 21 bp, homo sapiens
gatgatgatgaagatgatgat

SEQ ID NO: 48659 - RNA, 21 nt, RNAi
ugaugaugaagaugaugauuu

SEQ ID NO: 48660 - RNA, 21 nt, RNAi
uuacuacuacuucuacuacua

SEQ ID NO: 48661 - DNA, 21 bp, homo sapiens
gatgatgaagatgatgatgat

SEQ ID NO: 48662 - RNA, 21 nt, RNAi
ugaugaagaugaugaugauuu

SEQ ID NO: 48663 - RNA, 21 nt, RNAi
uuacuacuucuacuacuacua

SEQ ID NO: 48664 - DNA, 21 bp, homo sapiens
gatgaagatgatgatgatgat

SEQ ID NO: 48665 - RNA, 21 nt, RNAi
ugaagaugaugaugaugauuu

SEQ ID NO: 48666 - RNA, 21 nt, RNAi
uuacuucuacuacuacuacua

SEQ ID NO: 48667 - DNA, 21 bp, homo sapiens
gaagatgatgatgatgatgat

SEQ ID NO: 48668 - RNA, 21 nt, RNAi
agaugaugaugaugaugauuu

SEQ ID NO: 48669 - RNA, 21 nt, RNAi
uuucuacuacuacuacuacua

SEQ ID NO: 48670 - DNA, 21 bp, homo sapiens
gatgatgaggaagctgaagaa

SEQ ID NO: 48671 - RNA, 21 nt, RNAi
ugaugaggaagcugaagaauu

SEQ ID NO: 48672 - RNA, 21 nt, RNAi
uuacuacuccuucgacuucuu

SEQ ID NO: 48673 - DNA, 21 bp, homo sapiens
gaagaaatctatacgagatac

SEQ ID NO: 48674 - RNA, 21 nt, RNAi
agaaaucuauacgagauacuu

SEQ ID NO: 48675 - RNA, 21 nt, RNAi
uuucuuuagauaugcucuaug

SEQ ID NO: 48676 - DNA, 21 bp, homo sapiens
gaaatctatacgagatactcc

SEQ ID NO: 48677 - RNA, 21 nt, RNAi
aaucuauacgagauacuccuu

SEQ ID NO: 48678 - RNA, 21 nt, RNAi
uuuuagauaugcucuaugagg

SEQ ID NO: 48679 - DNA, 21 bp, homo sapiens
gacaagaatccttcaagaaac

SEQ ID NO: 48680 - RNA, 21 nt, RNAi
caagaauccuucaagaaacuu

SEQ ID NO: 48681 - RNA, 21 nt, RNAi
uuguucuuaggaaguucuuug

SEQ ID NO: 48682 - DNA, 21 bp, homo sapiens
gaatccttcaagaaacaggaa

SEQ ID NO: 48683 - RNA, 21 nt, RNAi
auccuucaagaaacaggaauu

SEQ ID NO: 48684 - RNA, 21 nt, RNAi
uuuaggaaguucuuuguccuu

SEQ ID NO: 48685 - DNA, 21 bp, homo sapiens
gacctagttctgtagaagaca

SEQ ID NO: 48686 - RNA, 21 nt, RNAi
ccuaguucuguagaagacauu

SEQ ID NO: 48687 - RNA, 21 nt, RNAi
uuggaucaagacaucuucugu

SEQ ID NO: 48688 - DNA, 21 bp, homo sapiens
gaagaattgcttccggatgac

SEQ ID NO: 48689 - RNA, 21 nt, RNAi
agaauugcuuccggaugacuu

SEQ ID NO: 48690 - RNA, 21 nt, RNAi
uuucuuaacgaaggccuacug

SEQ ID NO: 48691 - DNA, 21 bp, homo sapiens
gaattgcttccggatgactga

SEQ ID NO: 48692 - RNA, 21 nt, RNAi
auugcuuccggaugacugauu

SEQ ID NO: 48693 - RNA, 21 nt, RNAi
uuuaacgaaggccuacugacu

SEQ ID NO: 48694 - DNA, 21 bp, homo sapiens
gatgactgaccaagaggctat

SEQ ID NO: 48695 - RNA, 21 nt, RNAi
ugacugaccaagaggcuauuu

SEQ ID NO: 48696 - RNA, 21 nt, RNAi
uuacugacugguucuccgaua

SEQ ID NO: 48697 - DNA, 21 bp, homo sapiens
gactgaccaagaggctattca

SEQ ID NO: 48698 - RNA, 21 nt, RNAi
cugaccaagaggcuauucauu

SEQ ID NO: 48699 - RNA, 21 nt, RNAi
uugacugguucuccgauaagu

SEQ ID NO: 48700 - DNA, 21 bp, homo sapiens
gaccaagaggctattcaagat

SEQ ID NO: 48701 - RNA, 21 nt, RNAi
ccaagaggcuauucaagauuu

SEQ ID NO: 48702 - RNA, 21 nt, RNAi
uugguucuccgauaaguucua

SEQ ID NO: 48703 - DNA, 21 bp, homo sapiens
gaggctattcaagatctctgg

SEQ ID NO: 48704 - RNA, 21 nt, RNAi
ggcuauucaagaucucugguu

SEQ ID NO: 48705 - RNA, 21 nt, RNAi
uuccgauaaguucuagagacc

SEQ ID NO: 48706 - DNA, 21 bp, homo sapiens
gatctctggcagtggaggaag

SEQ ID NO: 48707 - RNA, 21 nt, RNAi
ucucuggcaguggaggaaguu

SEQ ID NO: 48708 - RNA, 21 nt, RNAi
uuagagaccgucaccuccuuc

SEQ ID NO: 48709 - DNA, 21 bp, homo sapiens
gataaatgttgtccaggttct

SEQ ID NO: 48710 - RNA, 21 nt, RNAi
uaaauguuguccagguucuuu

SEQ ID NO: 48711 - RNA, 21 nt, RNAi
uuauuuacaacagguccaaga

SEQ ID NO: 48712 - DNA, 21 bp, homo sapiens
gaatgttatgataggacatag

SEQ ID NO: 48713 - RNA, 21 nt, RNAi
auguuaugauaggacauaguu

SEQ ID NO: 48714 - RNA, 21 nt, RNAi
uuuacaauacuauccuguauc

SEQ ID NO: 48715 - DNA, 21 bp, homo sapiens
gataggacatagtagtagcgg

SEQ ID NO: 48716 - RNA, 21 nt, RNAi
uaggacauaguaguagcgguu

SEQ ID NO: 48717 - RNA, 21 nt, RNAi
uuauccuguaucaucaucgcc

SEQ ID NO: 48718 - DNA, 21 bp, homo sapiens
gacatagtagtagcggtggtc

SEQ ID NO: 48719 - RNA, 21 nt, RNAi
cauaguaguagcgguggucuu

SEQ ID NO: 48720 - RNA, 21 nt, RNAi
uuguaucaucaucgccaccag

SEQ ID NO: 48721 - DNA, 21 bp, homo sapiens
tatctccgtccgccttctctc

SEQ ID NO: 48722 - RNA, 21 nt, RNAi
ucuccguccgccuucucucuu

SEQ ID NO: 48723 - RNA, 21 nt, RNAi
uuagaggcaggcggaagagag

SEQ ID NO: 48724 - DNA, 21 bp, homo sapiens
tacctaagtgcgtgccgccac

SEQ ID NO: 48725 - RNA, 21 nt, RNAi
ccuaagugcgugccgccacuu

SEQ ID NO: 48726 - RNA, 21 nt, RNAi
uuggauucacgcacggcggug

SEQ ID NO: 48727 - DNA, 21 bp, homo sapiens
taaaggccgacaaagattatc

SEQ ID NO: 48728 - RNA, 21 nt, RNAi
aaggccgacaaagauuaucuu

SEQ ID NO: 48729 - RNA, 21 nt, RNAi
uuuuccggcuguuucuaauag

SEQ ID NO: 48730 - DNA, 21 bp, homo sapiens
tatctttaagaacggtcagtt

SEQ ID NO: 48731 - RNA, 21 nt, RNAi
ucuuuaagaacggucaguuuu

SEQ ID NO: 48732 - RNA, 21 nt, RNAi
uuagaaauucuugccagucaa

SEQ ID NO: 48733 - DNA, 21 bp, homo sapiens
tacgaaggcagtccaattaaa

SEQ ID NO: 48734 - RNA, 21 nt, RNAi
cgaaggcaguccaauuaaauu

SEQ ID NO: 48735 - RNA, 21 nt, RNAi
uugcuuccgucagguuaauuu

SEQ ID NO: 48736 - DNA, 21 bp, homo sapiens
taaagtaacactggcaacttt

SEQ ID NO: 48737 - RNA, 21 nt, RNAi
aaguaacacuggcaacuuuuu

SEQ ID NO: 48738 - RNA, 21 nt, RNAi
uuuucauugugaccguugaaa

SEQ ID NO: 48739 - DNA, 21 bp, homo sapiens
taacaccaccagtggtcttaa

SEQ ID NO: 48740 - RNA, 21 nt, RNAi
acaccaccaguggucuuaauu

SEQ ID NO: 48741 - RNA, 21 nt, RNAi
uuugugguggucaccagaauu

SEQ ID NO: 48742 - DNA, 21 bp, homo sapiens
taaggttgaagtgtggttcag

SEQ ID NO: 48743 - RNA, 21 nt, RNAi
agguugaagugugguucaguu

SEQ ID NO: 48744 - RNA, 21 nt, RNAi
uuuccaacuucacaccaaguc

SEQ ID NO: 48745 - DNA, 21 bp, homo sapiens
tattagtggacagcacttagt

SEQ ID NO: 48746 - RNA, 21 nt, RNAi
uuaguggacagcacuuaguuu

SEQ ID NO: 48747 - RNA, 21 nt, RNAi
uuaaucaccugucgugaauca

SEQ ID NO: 48748 - DNA, 21 bp, homo sapiens
tagtggacagcacttagtagc

SEQ ID NO: 48749 - RNA, 21 nt, RNAi
guggacagcacuuaguagcuu

SEQ ID NO: 48750 - RNA, 21 nt, RNAi
uucaccugucgugaaucaucg

SEQ ID NO: 48751 - DNA, 21 bp, homo sapiens
tagtagctgtggaggaagatg

SEQ ID NO: 48752 - RNA, 21 nt, RNAi
guagcuguggaggaagauguu

SEQ ID NO: 48753 - RNA, 21 nt, RNAi
uucaucgacaccuccuucuac

SEQ ID NO: 48754 - DNA, 21 bp, homo sapiens
tagctgtggaggaagatgcag

SEQ ID NO: 48755 - RNA, 21 nt, RNAi
gcuguggaggaagaugcaguu

SEQ ID NO: 48756 - RNA, 21 nt, RNAi
uucgacaccuccuucuacguc

SEQ ID NO: 48757 - DNA, 21 bp, homo sapiens
taagtatatctggaaagcggt

SEQ ID NO: 48758 - RNA, 21 nt, RNAi
aguauaucuggaaagcgguuu

SEQ ID NO: 48759 - RNA, 21 nt, RNAi
uuucauauagaccuuucgcca

SEQ ID NO: 48760 - DNA, 21 bp, homo sapiens
tatatctggaaagcggtctgc

SEQ ID NO: 48761 - RNA, 21 nt, RNAi
uaucuggaaagcggucugcuu

SEQ ID NO: 48762 - RNA, 21 nt, RNAi
uuauagaccuuucgccagacg

SEQ ID NO: 48763 - DNA, 21 bp, homo sapiens
tatacgagatactccagccaa

SEQ ID NO: 48764 - RNA, 21 nt, RNAi
uacgagauacuccagccaauu

SEQ ID NO: 48765 - RNA, 21 nt, RNAi
uuaugcucuaugaggucgguu

SEQ ID NO: 48766 - DNA, 21 bp, homo sapiens
tatgtgaagaattgcttccgg

SEQ ID NO: 48767 - RNA, 21 nt, RNAi
ugugaagaauugcuuccgguu

SEQ ID NO: 48768 - RNA, 21 nt, RNAi
uuacacuucuuaacgaaggcc

SEQ ID NO: 48769 - DNA, 21 bp, homo sapiens
tattcaagatctctggcagtg

SEQ ID NO: 48770 - RNA, 21 nt, RNAi
uucaagaucucuggcaguguu

SEQ ID NO: 48771 - RNA, 21 nt, RNAi
uuaaguucuagagaccgucac

SEQ ID NO: 48772 - DNA, 21 bp, homo sapiens
taacagttgatatctggctgt

SEQ ID NO: 48773 - RNA, 21 nt, RNAi
acaguugauaucuggcuguuu

SEQ ID NO: 48774 - RNA, 21 nt, RNAi
uuugucaacuauagaccgaca

SEQ ID NO: 48775 - DNA, 21 bp, homo sapiens
tataatgcagagtgagaactt

SEQ ID NO: 48776 - RNA, 21 nt, RNAi
uaaugcagagugagaacuuuu

SEQ ID NO: 48777 - RNA, 21 nt, RNAi
uuauuacgucucacucuugaa

SEQ ID NO: 48778 - DNA, 21 bp, homo sapiens
taatgcagagtgagaactttc

SEQ ID NO: 48779 - RNA, 21 nt, RNAi
augcagagugagaacuuucuu

SEQ ID NO: 48780 - RNA, 21 nt, RNAi
uuuacgucucacucuugaaag

SEQ ID NO: 48781 - DNA, 21 bp, homo sapiens
taccgtgtttgataaatgttg

SEQ ID NO: 48782 - RNA, 21 nt, RNAi
ccguguuugauaaauguuguu

SEQ ID NO: 48783 - RNA, 21 nt, RNAi
uuggcacaaacuauuuacaac

SEQ ID NO: 48784 - DNA, 21 bp, homo sapiens
taaatgttgtccaggttctat

SEQ ID NO: 48785 - RNA, 21 nt, RNAi
aauguuguccagguucuauuu

SEQ ID NO: 48786 - RNA, 21 nt, RNAi
uuuuacaacagguccaagaua

SEQ ID NO: 48787 - DNA, 21 bp, homo sapiens
tattgccaagaatgtgttgtc

SEQ ID NO: 48788 - RNA, 21 nt, RNAi
uugccaagaauguguugucuu

SEQ ID NO: 48789 - RNA, 21 nt, RNAi
uuaacgguucuuacacaacag

SEQ ID NO: 48790 - DNA, 21 bp, homo sapiens
tatggaatgttatgataggac

SEQ ID NO: 48791 - RNA, 21 nt, RNAi
uggaauguuaugauaggacuu

SEQ ID NO: 48792 - RNA, 21 nt, RNAi
uuaccuuacaauacuauccug

SEQ ID NO: 48793 - DNA, 21 bp, homo sapiens
tatgataggacatagtagtag

SEQ ID NO: 48794 - RNA, 21 nt, RNAi
ugauaggacauaguaguaguu

SEQ ID NO: 48795 - RNA, 21 nt, RNAi
uuacuauccuguaucaucauc

SEQ ID NO: 48796 - DNA, 21 bp, homo sapiens
taggacatagtagtagcggtg

SEQ ID NO: 48797 - RNA, 21 nt, RNAi
ggacauaguaguagcgguguu

SEQ ID NO: 48798 - RNA, 21 nt, RNAi
uuccuguaucaucaucgccac

SEQ ID NO: 48799 - DNA, 21 bp, homo sapiens
tagtagtagcggtggtcagac

SEQ ID NO: 48800 - RNA, 21 nt, RNAi
guaguagcgguggucagacuu

SEQ ID NO: 48801 - RNA, 21 nt, RNAi
uucaucaucgccaccagucug

SEQ ID NO: 48802 - DNA, 21 bp, homo sapiens
tagtagcggtggtcagacatg

SEQ ID NO: 48803 - RNA, 21 nt, RNAi
guagcgguggucagacauguu

SEQ ID NO: 48804 - RNA, 21 nt, RNAi
uucaucgccaccagucuguac

SEQ ID NO: 48805 - DNA, 21 bp, homo sapiens
tagcggtggtcagacatggaa

SEQ ID NO: 48806 - RNA, 21 nt, RNAi
gcgguggucagacauggaauu

SEQ ID NO: 48807 - RNA, 21 nt, RNAi
uucgccaccagucuguaccuu

SEQ ID NO: 48808 - DNA, 21 bp, homo sapiens
aactcgagctgccatgagcct

SEQ ID NO: 48809 - RNA, 21 nt, RNAi
cucgagcugccaugagccuuu

SEQ ID NO: 48810 - RNA, 21 nt, RNAi
uugagcucgacgguacucgga

SEQ ID NO: 48811 - DNA, 21 bp, homo sapiens
aacctggtgcagtgtggtgac

SEQ ID NO: 48812 - RNA, 21 nt, RNAi
ccuggugcaguguggugacuu

SEQ ID NO: 48813 - RNA, 21 nt, RNAi
uuggaccacgucacaccacug

SEQ ID NO: 48814 - DNA, 21 bp, homo sapiens
aactttatggtgttggagtgg

SEQ ID NO: 48815 - RNA, 21 nt, RNAi
cuuuaugguguuggagugguu

SEQ ID NO: 48816 - RNA, 21 nt, RNAi
uugaaauaccacaaccucacc

SEQ ID NO: 48817 - DNA, 21 bp, homo sapiens
aattgaacatcagaccatcac

SEQ ID NO: 48818 - RNA, 21 nt, RNAi
uugaacaucagaccaucacuu

SEQ ID NO: 48819 - RNA, 21 nt, RNAi
uuaacuuguagucugguagug

SEQ ID NO: 48820 - DNA, 21 bp, homo sapiens
aacatcagaccatcacaactc

SEQ ID NO: 48821 - RNA, 21 nt, RNAi
caucagaccaucacaacucuu

SEQ ID NO: 48822 - RNA, 21 nt, RNAi
uuguagucugguaguguugag

SEQ ID NO: 48823 - DNA, 21 bp, homo sapiens
aattgaaattagcaccattgc

SEQ ID NO: 48824 - RNA, 21 nt, RNAi
uugaaauuagcaccauugcuu

SEQ ID NO: 48825 - RNA, 21 nt, RNAi
uuaacuuuaaucgugguaacg

SEQ ID NO: 48826 - DNA, 21 bp, homo sapiens
aaattagcaccattgcaagta

SEQ ID NO: 48827 - RNA, 21 nt, RNAi
auuagcaccauugcaaguauu

SEQ ID NO: 48828 - RNA, 21 nt, RNAi
uuuaaucgugguaacguucau

SEQ ID NO: 48829 - DNA, 21 bp, homo sapiens
aattagcaccattgcaagtaa

SEQ ID NO: 48830 - RNA, 21 nt, RNAi
uuagcaccauugcaaguaauu

SEQ ID NO: 48831 - RNA, 21 nt, RNAi
uuaaucgugguaacguucauu

SEQ ID NO: 48832 - DNA, 21 bp, homo sapiens
aagtaactaccaccttgaagt

SEQ ID NO: 48833 - RNA, 21 nt, RNAi
guaacuaccaccuugaaguuu

SEQ ID NO: 48834 - RNA, 21 nt, RNAi
uucauugaugguggaacuuca

SEQ ID NO: 48835 - DNA, 21 bp, homo sapiens
aactaccaccttgaagttaat

SEQ ID NO: 48836 - RNA, 21 nt, RNAi
cuaccaccuugaaguuaauuu

SEQ ID NO: 48837 - RNA, 21 nt, RNAi
uugaugguggaacuucaauua

SEQ ID NO: 48838 - DNA, 21 bp, homo sapiens
aagttaatcctagtgatgctg

SEQ ID NO: 48839 - RNA, 21 nt, RNAi
guuaauccuagugaugcuguu

SEQ ID NO: 48840 - RNA, 21 nt, RNAi
uucaauuaggaucacuacgac

SEQ ID NO: 48841 - DNA, 21 bp, homo sapiens
aatcctagtgatgctggaaat

SEQ ID NO: 48842 - RNA, 21 nt, RNAi
uccuagugaugcuggaaauuu

SEQ ID NO: 48843 - RNA, 21 nt, RNAi
uuaggaucacuacgaccuuua

SEQ ID NO: 48844 - DNA, 21 bp, homo sapiens
aaatagtgaccgagtagtcat

SEQ ID NO: 48845 - RNA, 21 nt, RNAi
auagugaccgaguagucauuu

SEQ ID NO: 48846 - RNA, 21 nt, RNAi
uuuaucacuggcucaucagua

SEQ ID NO: 48847 - DNA, 21 bp, homo sapiens
aatagtgaccgagtagtcatt

SEQ ID NO: 48848 - RNA, 21 nt, RNAi
uagugaccgaguagucauuuu

SEQ ID NO: 48849 - RNA, 21 nt, RNAi
uuaucacuggcucaucaguaa

SEQ ID NO: 48850 - DNA, 21 bp, homo sapiens
aaacagtggcacaatcacaac

SEQ ID NO: 48851 - RNA, 21 nt, RNAi
acaguggcacaaucacaacuu

SEQ ID NO: 48852 - RNA, 21 nt, RNAi
uuugucaccguguuaguguug

SEQ ID NO: 48853 - DNA, 21 bp, homo sapiens
aacagtggcacaatcacaaca

SEQ ID NO: 48854 - RNA, 21 nt, RNAi
caguggcacaaucacaacauu

SEQ ID NO: 48855 - RNA, 21 nt, RNAi
uugucaccguguuaguguugu

SEQ ID NO: 48856 - DNA, 21 bp, homo sapiens
aacaacttgaaacaaactctc

SEQ ID NO: 48857 - RNA, 21 nt, RNAi
caacuugaaacaaacucucuu

SEQ ID NO: 48858 - RNA, 21 nt, RNAi
uuguugaacuuuguuugagag

SEQ ID NO: 48859 - DNA, 21 bp, homo sapiens
aagtggtattattgacagaag

SEQ ID NO: 48860 - RNA, 21 nt, RNAi
gugguauuauugacagaaguu

SEQ ID NO: 48861 - RNA, 21 nt, RNAi
uucaccauaauaacugucuuc

SEQ ID NO: 48862 - DNA, 21 bp, homo sapiens
aagttgacaaactcaccaaag

SEQ ID NO: 48863 - RNA, 21 nt, RNAi
guugacaaacucaccaaaguu

SEQ ID NO: 48864 - RNA, 21 nt, RNAi
uucaacuguuugagugguuuc

SEQ ID NO: 48865 - DNA, 21 bp, homo sapiens
aaactcaccaaagatgctcag

SEQ ID NO: 48866 - RNA, 21 nt, RNAi
acucaccaaagaugcucaguu

SEQ ID NO: 48867 - RNA, 21 nt, RNAi
uuugagugguuucuacgaguc

SEQ ID NO: 48868 - DNA, 21 bp, homo sapiens
aactcaccaaagatgctcagc

SEQ ID NO: 48869 - RNA, 21 nt, RNAi
cucaccaaagaugcucagcuu

SEQ ID NO: 48870 - RNA, 21 nt, RNAi
uugagugguuucuacgagucg

SEQ ID NO: 48871 - DNA, 21 bp, homo sapiens
aaagatgctcagcatgccttg

SEQ ID NO: 48872 - RNA, 21 nt, RNAi
agaugcucagcaugccuuguu

SEQ ID NO: 48873 - RNA, 21 nt, RNAi
uuucuacgagucguacggaac

SEQ ID NO: 48874 - DNA, 21 bp, homo sapiens
aagatgctcagcatgccttgc

SEQ ID NO: 48875 - RNA, 21 nt, RNAi
gaugcucagcaugccuugcuu

SEQ ID NO: 48876 - RNA, 21 nt, RNAi
uucuacgagucguacggaacg

SEQ ID NO: 48877 - DNA, 21 bp, homo sapiens
aaatatatgtctacctgcaga

SEQ ID NO: 48878 - RNA, 21 nt, RNAi
auauaugucuaccugcagauu

SEQ ID NO: 48879 - RNA, 21 nt, RNAi
uuuauauacagauggacgucu

SEQ ID NO: 48880 - DNA, 21 bp, homo sapiens
aatatatgtctacctgcagat

SEQ ID NO: 48881 - RNA, 21 nt, RNAi
uauaugucuaccugcagauuu

SEQ ID NO: 48882 - RNA, 21 nt, RNAi
uuauauacagauggacgucua

SEQ ID NO: 48883 - DNA, 21 bp, homo sapiens
aagatatttgccacgtgttat

SEQ ID NO: 48884 - RNA, 21 nt, RNAi
gauauuugccacguguuauuu

SEQ ID NO: 48885 - RNA, 21 nt, RNAi
uucuauaaacggugcacaaua

SEQ ID NO: 48886 - DNA, 21 bp, homo sapiens
aagaaggaaggtctgaatctt

SEQ ID NO: 48887 - RNA, 21 nt, RNAi
gaaggaaggucugaaucuuuu

SEQ ID NO: 48888 - RNA, 21 nt, RNAi
uucuuccuuccagacuuagaa

SEQ ID NO: 48889 - DNA, 21 bp, homo sapiens
aaggaaggtctgaatcttcct

SEQ ID NO: 48890 - RNA, 21 nt, RNAi
ggaaggucugaaucuuccuuu

SEQ ID NO: 48891 - RNA, 21 nt, RNAi
uuccuuccagacuuagaagga

SEQ ID NO: 48892 - DNA, 21 bp, homo sapiens
aaggtctgaatcttccttcac

SEQ ID NO: 48893 - RNA, 21 nt, RNAi
ggucugaaucuuccuucacuu

SEQ ID NO: 48894 - RNA, 21 nt, RNAi
uuccagacuuagaaggaagug

SEQ ID NO: 48895 - DNA, 21 bp, homo sapiens
aatcttccttcacaactggct

SEQ ID NO: 48896 - RNA, 21 nt, RNAi
ucuuccuucacaacuggcuuu

SEQ ID NO: 48897 - RNA, 21 nt, RNAi
uuagaaggaaguguugaccga

SEQ ID NO: 48898 - DNA, 21 bp, homo sapiens
aactggctcatagacttgcag

SEQ ID NO: 48899 - RNA, 21 nt, RNAi
cuggcucauagacuugcaguu

SEQ ID NO: 48900 - RNA, 21 nt, RNAi
uugaccgaguaucugaacguc

SEQ ID NO: 48901 - DNA, 21 bp, homo sapiens
aagtcttgtagaaatctcaga

SEQ ID NO: 48902 - RNA, 21 nt, RNAi
gucuuguagaaaucucagauu

SEQ ID NO: 48903 - RNA, 21 nt, RNAi
uucagaacaucuuuagagucu

SEQ ID NO: 48904 - DNA, 21 bp, homo sapiens
aagcctgcagagtgcaacaat

SEQ ID NO: 48905 - RNA, 21 nt, RNAi
gccugcagagugcaacaauuu

SEQ ID NO: 48906 - RNA, 21 nt, RNAi
uucggacgucucacguuguua

SEQ ID NO: 48907 - DNA, 21 bp, homo sapiens
aaatgctattgtcagtcagca

SEQ ID NO: 48908 - RNA, 21 nt, RNAi
augcuauugucagucagcauu

SEQ ID NO: 48909 - RNA, 21 nt, RNAi
uuuacgauaacagucagucgu

SEQ ID NO: 48910 - DNA, 21 bp, homo sapiens
aatgctattgtcagtcagcaa

SEQ ID NO: 48911 - RNA, 21 nt, RNAi
ugcuauugucagucagcaauu

SEQ ID NO: 48912 - RNA, 21 nt, RNAi
uuacgauaacagucagucguu

SEQ ID NO: 48913 - DNA, 21 bp, homo sapiens
aaactccacaaaggctccttg

SEQ ID NO: 48914 - RNA, 21 nt, RNAi
acuccacaaaggcuccuuguu

SEQ ID NO: 48915 - RNA, 21 nt, RNAi
uuugagguguuuccgaggaac

SEQ ID NO: 48916 - DNA, 21 bp, homo sapiens
aactccacaaaggctccttga

SEQ ID NO: 48917 - RNA, 21 nt, RNAi
cuccacaaaggcuccuugauu

SEQ ID NO: 48918 - RNA, 21 nt, RNAi
uugagguguuuccgaggaacu

SEQ ID NO: 48919 - DNA, 21 bp, homo sapiens
aaaggctccttgaagttcgtg

SEQ ID NO: 48920 - RNA, 21 nt, RNAi
aggcuccuugaaguucguguu

SEQ ID NO: 48921 - RNA, 21 nt, RNAi
uuuccgaggaacuucaagcac

SEQ ID NO: 48922 - DNA, 21 bp, homo sapiens
aaggctccttgaagttcgtgg

SEQ ID NO: 48923 - RNA, 21 nt, RNAi
ggcuccuugaaguucgugguu

SEQ ID NO: 48924 - RNA, 21 nt, RNAi
uuccgaggaacuucaagcacc

SEQ ID NO: 48925 - DNA, 21 bp, homo sapiens
aagttcgtggaaggctgtatg

SEQ ID NO: 48926 - RNA, 21 nt, RNAi
guucguggaaggcuguauguu

SEQ ID NO: 48927 - RNA, 21 nt, RNAi
uucaagcaccuuccgacauac

SEQ ID NO: 48928 - DNA, 21 bp, homo sapiens
aaggctgtatgagcttctaac

SEQ ID NO: 48929 - RNA, 21 nt, RNAi
ggcuguaugagcuucuaacuu

SEQ ID NO: 48930 - RNA, 21 nt, RNAi
uuccgacauacucgaagauug

SEQ ID NO: 48931 - DNA, 21 bp, homo sapiens
aactcattgtattcctcctga

SEQ ID NO: 48932 - RNA, 21 nt, RNAi
cucauuguauuccuccugauu

SEQ ID NO: 48933 - RNA, 21 nt, RNAi
uugaguaacauaaggaggacu

SEQ ID NO: 48934 - DNA, 21 bp, homo sapiens
aattgtgatggacaactgaaa

SEQ ID NO: 48935 - RNA, 21 nt, RNAi
uugugauggacaacugaaauu

SEQ ID NO: 48936 - RNA, 21 nt, RNAi
uuaacacuaccuguugacuuu

SEQ ID NO: 48937 - DNA, 21 bp, homo sapiens
aaatggcagcttactatgagc

SEQ ID NO: 48938 - RNA, 21 nt, RNAi
auggcagcuuacuaugagcuu

SEQ ID NO: 48939 - RNA, 21 nt, RNAi
uuuaccgucgaaugauacucg

SEQ ID NO: 48940 - DNA, 21 bp, homo sapiens
aatggcagcttactatgagca

SEQ ID NO: 48941 - RNA, 21 nt, RNAi
uggcagcuuacuaugagcauu

SEQ ID NO: 48942 - RNA, 21 nt, RNAi
uuaccgucgaaugauacucgu

SEQ ID NO: 48943 - DNA, 21 bp, homo sapiens
aaagccatttatcacttggaa

SEQ ID NO: 48944 - RNA, 21 nt, RNAi
agccauuuaucacuuggaauu

SEQ ID NO: 48945 - RNA, 21 nt, RNAi
uuucgguaaauagugaaccuu

SEQ ID NO: 48946 - DNA, 21 bp, homo sapiens
aagccatttatcacttggaag

SEQ ID NO: 48947 - RNA, 21 nt, RNAi
gccauuuaucacuuggaaguu

SEQ ID NO: 48948 - RNA, 21 nt, RNAi
uucgguaaauagugaaccuuc

SEQ ID NO: 48949 - DNA, 21 bp, homo sapiens
aagcgtttgtggccaaattca

SEQ ID NO: 48950 - RNA, 21 nt, RNAi
gcguuuguggccaaauucauu

SEQ ID NO: 48951 - RNA, 21 nt, RNAi
uucgcaaacaccgguuuaagu

SEQ ID NO: 48952 - DNA, 21 bp, homo sapiens
aagaagttcatggaggatgga

SEQ ID NO: 48953 - RNA, 21 nt, RNAi
gaaguucauggaggauggauu

SEQ ID NO: 48954 - RNA, 21 nt, RNAi
uucuucaaguaccuccuaccu

SEQ ID NO: 48955 - DNA, 21 bp, homo sapiens
aagttcatggaggatggattg

SEQ ID NO: 48956 - RNA, 21 nt, RNAi
guucauggaggauggauuguu

SEQ ID NO: 48957 - RNA, 21 nt, RNAi
uucaaguaccuccuaccuaac

SEQ ID NO: 48958 - DNA, 21 bp, homo sapiens
aaggcatgatgttctgacttc

SEQ ID NO: 48959 - RNA, 21 nt, RNAi
ggcaugauguucugacuucuu

SEQ ID NO: 48960 - RNA, 21 nt, RNAi
uuccguacuacaagacugaag

SEQ ID NO: 48961 - DNA, 21 bp, homo sapiens
aactgaacttaatcatgtcgt

SEQ ID NO: 48962 - RNA, 21 nt, RNAi
cugaacuuaaucaugucguuu

SEQ ID NO: 48963 - RNA, 21 nt, RNAi
uugacuugaauuaguacagca

SEQ ID NO: 48964 - DNA, 21 bp, homo sapiens
aatcatgtcgtatttgcgttt

SEQ ID NO: 48965 - RNA, 21 nt, RNAi
ucaugucguauuugcguuuuu

SEQ ID NO: 48966 - RNA, 21 nt, RNAi
uuaguacagcauaaacgcaaa

SEQ ID NO: 48967 - DNA, 21 bp, homo sapiens
aactattaatcatcctctgag

SEQ ID NO: 48968 - RNA, 21 nt, RNAi
cuauuaaucauccucugaguu

SEQ ID NO: 48969 - RNA, 21 nt, RNAi
uugauaauuaguaggagacuc

SEQ ID NO: 48970 - DNA, 21 bp, homo sapiens
aacttagagactttagagtct

SEQ ID NO: 48971 - RNA, 21 nt, RNAi
cuuagagacuuuagagucuuu

SEQ ID NO: 48972 - RNA, 21 nt, RNAi
uugaaucucugaaaucucaga

SEQ ID NO: 48973 - DNA, 21 bp, homo sapiens
aagtattcattgttgatcctc

SEQ ID NO: 48974 - RNA, 21 nt, RNAi
guauucauuguugauccucuu

SEQ ID NO: 48975 - RNA, 21 nt, RNAi
uucauaaguaacaacuaggag

SEQ ID NO: 48976 - DNA, 21 bp, homo sapiens
aatctctcacctgctaaagga

SEQ ID NO: 48977 - RNA, 21 nt, RNAi
ucucucaccugcuaaaggauu

SEQ ID NO: 48978 - RNA, 21 nt, RNAi
uuagagaguggacgauuuccu

SEQ ID NO: 48979 - DNA, 21 bp, homo sapiens
aacatgattgtttgacacacc

SEQ ID NO: 48980 - RNA, 21 nt, RNAi
caugauuguuugacacaccuu

SEQ ID NO: 48981 - RNA, 21 nt, RNAi
uuguacuaacaaacugugugg

SEQ ID NO: 48982 - DNA, 21 bp, homo sapiens
aaattgcagataccatttctg

SEQ ID NO: 48983 - RNA, 21 nt, RNAi
auugcagauaccauuucuguu

SEQ ID NO: 48984 - RNA, 21 nt, RNAi
uuuaacgucuaugguaaagac

SEQ ID NO: 48985 - DNA, 21 bp, homo sapiens
aattgcagataccatttctgt

SEQ ID NO: 48986 - RNA, 21 nt, RNAi
uugcagauaccauuucuguuu

SEQ ID NO: 48987 - RNA, 21 nt, RNAi
uuaacgucuaugguaaagaca

SEQ ID NO: 48988 - DNA, 21 bp, homo sapiens
aagtacttgagactcttgaag

SEQ ID NO: 48989 - RNA, 21 nt, RNAi
guacuugagacucuugaaguu

SEQ ID NO: 48990 - RNA, 21 nt, RNAi
uucaugaacucugagaacuuc

SEQ ID NO: 48991 - DNA, 21 bp, homo sapiens
aaattcagaatgaagttctgg

SEQ ID NO: 48992 - RNA, 21 nt, RNAi
auucagaaugaaguucugguu

SEQ ID NO: 48993 - RNA, 21 nt, RNAi
uuuaagucuuacuucaagacc

SEQ ID NO: 48994 - DNA, 21 bp, homo sapiens
aattcagaatgaagttctgga

SEQ ID NO: 48995 - RNA, 21 nt, RNAi
uucagaaugaaguucuggauu

SEQ ID NO: 48996 - RNA, 21 nt, RNAi
uuaagucuuacuucaagaccu

SEQ ID NO: 48997 - DNA, 21 bp, homo sapiens
aatgaagttctggagaaaggt

SEQ ID NO: 48998 - RNA, 21 nt, RNAi
ugaaguucuggagaaagguuu

SEQ ID NO: 48999 - RNA, 21 nt, RNAi
uuacuucaagaccucuuucca

SEQ ID NO: 49000 - DNA, 21 bp, homo sapiens
aagttctggagaaaggtatgt

SEQ ID NO: 49001 - RNA, 21 nt, RNAi
guucuggagaaagguauguuu

SEQ ID NO: 49002 - RNA, 21 nt, RNAi
uucaagaccucuuuccauaca

SEQ ID NO: 49003 - DNA, 21 bp, homo sapiens
aaatttgtgtgacagactccg

SEQ ID NO: 49004 - RNA, 21 nt, RNAi
auuugugugacagacuccguu

SEQ ID NO: 49005 - RNA, 21 nt, RNAi
uuuaaacacacugucugaggc

SEQ ID NO: 49006 - DNA, 21 bp, homo sapiens
aatttgtgtgacagactccga

SEQ ID NO: 49007 - RNA, 21 nt, RNAi
uuugugugacagacuccgauu

SEQ ID NO: 49008 - RNA, 21 nt, RNAi
uuaaacacacugucugaggcu

SEQ ID NO: 49009 - DNA, 21 bp, homo sapiens
aacaattcctttactacgaag

SEQ ID NO: 49010 - RNA, 21 nt, RNAi
caauuccuuuacuacgaaguu

SEQ ID NO: 49011 - RNA, 21 nt, RNAi
uuguuaaggaaaugaugcuuc

SEQ ID NO: 49012 - DNA, 21 bp, homo sapiens
aatcaaggtatagatgccgtc

SEQ ID NO: 49013 - RNA, 21 nt, RNAi
ucaagguauagaugccgucuu

SEQ ID NO: 49014 - RNA, 21 nt, RNAi
uuaguuccauaucuacggcag

SEQ ID NO: 49015 - DNA, 21 bp, homo sapiens
aaagcctattcacttgctgat

SEQ ID NO: 49016 - RNA, 21 nt, RNAi
agccuauucacuugcugauuu

SEQ ID NO: 49017 - RNA, 21 nt, RNAi
uuucggauaagugaacgacua

SEQ ID NO: 49018 - DNA, 21 bp, homo sapiens
aagcctattcacttgctgatg

SEQ ID NO: 49019 - RNA, 21 nt, RNAi
gccuauucacuugcugauguu

SEQ ID NO: 49020 - RNA, 21 nt, RNAi
uucggauaagugaacgacuac

SEQ ID NO: 49021 - DNA, 21 bp, homo sapiens
cagtgtggtgactttcctcat

SEQ ID NO: 49022 - RNA, 21 nt, RNAi
guguggugacuuuccucauuu

SEQ ID NO: 49023 - RNA, 21 nt, RNAi
uucacaccacugaaaggagua

SEQ ID NO: 49024 - DNA, 21 bp, homo sapiens
catctgttagtgtacggacca

SEQ ID NO: 49025 - RNA, 21 nt, RNAi
ucuguuaguguacggaccauu

SEQ ID NO: 49026 - RNA, 21 nt, RNAi
uuagacaaucacaugccuggu

SEQ ID NO: 49027 - DNA, 21 bp, homo sapiens
catcagaccatcacaactcca

SEQ ID NO: 49028 - RNA, 21 nt, RNAi
ucagaccaucacaacuccauu

SEQ ID NO: 49029 - RNA, 21 nt, RNAi
uuagucugguaguguugaggu

SEQ ID NO: 49030 - DNA, 21 bp, homo sapiens
cagaccatcacaactccatct

SEQ ID NO: 49031 - RNA, 21 nt, RNAi
gaccaucacaacuccaucuuu

SEQ ID NO: 49032 - RNA, 21 nt, RNAi
uucugguaguguugagguaga

SEQ ID NO: 49033 - DNA, 21 bp, homo sapiens
caccattgcaagtaactacca

SEQ ID NO: 49034 - RNA, 21 nt, RNAi
ccauugcaaguaacuaccauu

SEQ ID NO: 49035 - RNA, 21 nt, RNAi
uugguaacguucauugauggu

SEQ ID NO: 49036 - DNA, 21 bp, homo sapiens
cattgcaagtaactaccacct

SEQ ID NO: 49037 - RNA, 21 nt, RNAi
uugcaaguaacuaccaccuuu

SEQ ID NO: 49038 - RNA, 21 nt, RNAi
uuaacguucauugauggugga

SEQ ID NO: 49039 - DNA, 21 bp, homo sapiens
caagtaactaccaccttgaag

SEQ ID NO: 49040 - RNA, 21 nt, RNAi
aguaacuaccaccuugaaguu

SEQ ID NO: 49041 - RNA, 21 nt, RNAi
uuucauugaugguggaacuuc

SEQ ID NO: 49042 - DNA, 21 bp, homo sapiens
caccttgaagttaatcctagt

SEQ ID NO: 49043 - RNA, 21 nt, RNAi
ccuugaaguuaauccuaguuu

SEQ ID NO: 49044 - RNA, 21 nt, RNAi
uuggaacuucaauuaggauca

SEQ ID NO: 49045 - DNA, 21 bp, homo sapiens
cagtggcacaatcacaacaac

SEQ ID NO: 49046 - RNA, 21 nt, RNAi
guggcacaaucacaacaacuu

SEQ ID NO: 49047 - RNA, 21 nt, RNAi
uucaccguguuaguguuguug

SEQ ID NO: 49048 - DNA, 21 bp, homo sapiens
cacaatcacaacaacttgaaa

SEQ ID NO: 49049 - RNA, 21 nt, RNAi
caaucacaacaacuugaaauu

SEQ ID NO: 49050 - RNA, 21 nt, RNAi
uuguuaguguuguugaacuuu

SEQ ID NO: 49051 - DNA, 21 bp, homo sapiens
caatcacaacaacttgaaaca

SEQ ID NO: 49052 - RNA, 21 nt, RNAi
aucacaacaacuugaaacauu

SEQ ID NO: 49053 - RNA, 21 nt, RNAi
uuuaguguuguugaacuuugu

SEQ ID NO: 49054 - DNA, 21 bp, homo sapiens
cacaacaacttgaaacaaact

SEQ ID NO: 49055 - RNA, 21 nt, RNAi
caacaacuugaaacaaacuuu

SEQ ID NO: 49056 - RNA, 21 nt, RNAi
uuguuguugaacuuuguuuga

SEQ ID NO: 49057 - DNA, 21 bp, homo sapiens
caacaacttgaaacaaactct

SEQ ID NO: 49058 - RNA, 21 nt, RNAi
acaacuugaaacaaacucuuu

SEQ ID NO: 49059 - RNA, 21 nt, RNAi
uuuguugaacuuuguuugaga

SEQ ID NO: 49060 - DNA, 21 bp, homo sapiens
caacttgaaacaaactctcaa

SEQ ID NO: 49061 - RNA, 21 nt, RNAi
acuugaaacaaacucucaauu

SEQ ID NO: 49062 - RNA, 21 nt, RNAi
uuugaacuuuguuugagaguu

SEQ ID NO: 49063 - DNA, 21 bp, homo sapiens
cagaagttgacaaactcacca

SEQ ID NO: 49064 - RNA, 21 nt, RNAi
gaaguugacaaacucaccauu

SEQ ID NO: 49065 - RNA, 21 nt, RNAi
uucuucaacuguuugaguggu

SEQ ID NO: 49066 - DNA, 21 bp, homo sapiens
caaactcaccaaagatgctca

SEQ ID NO: 49067 - RNA, 21 nt, RNAi
aacucaccaaagaugcucauu

SEQ ID NO: 49068 - RNA, 21 nt, RNAi
uuuugagugguuucuacgagu

SEQ ID NO: 49069 - DNA, 21 bp, homo sapiens
caccaaagatgctcagcatgc

SEQ ID NO: 49070 - RNA, 21 nt, RNAi
ccaaagaugcucagcaugcuu

SEQ ID NO: 49071 - RNA, 21 nt, RNAi
uugguuucuacgagucguacg

SEQ ID NO: 49072 - DNA, 21 bp, homo sapiens
caaagatgctcagcatgcctt

SEQ ID NO: 49073 - RNA, 21 nt, RNAi
aagaugcucagcaugccuuuu

SEQ ID NO: 49074 - RNA, 21 nt, RNAi
uuuucuacgagucguacggaa

SEQ ID NO: 49075 - DNA, 21 bp, homo sapiens
cagcatgccttgcgaagaacc

SEQ ID NO: 49076 - RNA, 21 nt, RNAi
gcaugccuugcgaagaaccuu

SEQ ID NO: 49077 - RNA, 21 nt, RNAi
uucguacggaacgcuucuugg

SEQ ID NO: 49078 - DNA, 21 bp, homo sapiens
catgccttgcgaagaaccatg

SEQ ID NO: 49079 - RNA, 21 nt, RNAi
ugccuugcgaagaaccauguu

SEQ ID NO: 49080 - RNA, 21 nt, RNAi
uuacggaacgcuucuugguac

SEQ ID NO: 49081 - DNA, 21 bp, homo sapiens
cagattgatcttgtgctgcaa

SEQ ID NO: 49082 - RNA, 21 nt, RNAi
gauugaucuugugcugcaauu

SEQ ID NO: 49083 - RNA, 21 nt, RNAi
uucuaacuagaacacgacguu

SEQ ID NO: 49084 - DNA, 21 bp, homo sapiens
cacctattcgtagtaggtgct

SEQ ID NO: 49085 - RNA, 21 nt, RNAi
ccuauucguaguaggugcuuu

SEQ ID NO: 49086 - RNA, 21 nt, RNAi
uuggauaagcaucauccacga

SEQ ID NO: 49087 - DNA, 21 bp, homo sapiens
cagcattgaagatatttgcca

SEQ ID NO: 49088 - RNA, 21 nt, RNAi
gcauugaagauauuugccauu

SEQ ID NO: 49089 - RNA, 21 nt, RNAi
uucguaacuucuauaaacggu

SEQ ID NO: 49090 - DNA, 21 bp, homo sapiens
cattgaagatatttgccacgt

SEQ ID NO: 49091 - RNA, 21 nt, RNAi
uugaagauauuugccacguuu

SEQ ID NO: 49092 - RNA, 21 nt, RNAi
uuaacuucuauaaacggugca

SEQ ID NO: 49093 - DNA, 21 bp, homo sapiens
cacgtgttatctactgtgtgt

SEQ ID NO: 49094 - RNA, 21 nt, RNAi
cguguuaucuacuguguguuu

SEQ ID NO: 49095 - RNA, 21 nt, RNAi
uugcacaauagaugacacaca

SEQ ID NO: 49096 - DNA, 21 bp, homo sapiens
cacaactggctcatagacttg

SEQ ID NO: 49097 - RNA, 21 nt, RNAi
caacuggcucauagacuuguu

SEQ ID NO: 49098 - RNA, 21 nt, RNAi
uuguugaccgaguaucugaac

SEQ ID NO: 49099 - DNA, 21 bp, homo sapiens
caactggctcatagacttgca

SEQ ID NO: 49100 - RNA, 21 nt, RNAi
acuggcucauagacuugcauu

SEQ ID NO: 49101 - RNA, 21 nt, RNAi
uuugaccgaguaucugaacgu

SEQ ID NO: 49102 - DNA, 21 bp, homo sapiens
catagacttgcagagaagtct

SEQ ID NO: 49103 - RNA, 21 nt, RNAi
uagacuugcagagaagucuuu

SEQ ID NO: 49104 - RNA, 21 nt, RNAi
uuaucugaacgucucuucaga

SEQ ID NO: 49105 - DNA, 21 bp, homo sapiens
cagagaagtcttgtagaaatc

SEQ ID NO: 49106 - RNA, 21 nt, RNAi
gagaagucuuguagaaaucuu

SEQ ID NO: 49107 - RNA, 21 nt, RNAi
uucucuucagaacaucuuuag

SEQ ID NO: 49108 - DNA, 21 bp, homo sapiens
cagagtgcaacaatatccttt

SEQ ID NO: 49109 - RNA, 21 nt, RNAi
gagugcaacaauauccuuuuu

SEQ ID NO: 49110 - RNA, 21 nt, RNAi
uucucacguuguuauaggaaa

SEQ ID NO: 49111 - DNA, 21 bp, homo sapiens
caaatgctattgtcagtcagc

SEQ ID NO: 49112 - RNA, 21 nt, RNAi
aaugcuauugucagucagcuu

SEQ ID NO: 49113 - RNA, 21 nt, RNAi
uuuuacgauaacagucagucg

SEQ ID NO: 49114 - DNA, 21 bp, homo sapiens
cagtcagcaaactccacaaag

SEQ ID NO: 49115 - RNA, 21 nt, RNAi
gucagcaaacuccacaaaguu

SEQ ID NO: 49116 - RNA, 21 nt, RNAi
uucagucguuugagguguuuc

SEQ ID NO: 49117 - DNA, 21 bp, homo sapiens
cagcaaactccacaaaggctc

SEQ ID NO: 49118 - RNA, 21 nt, RNAi
gcaaacuccacaaaggcucuu

SEQ ID NO: 49119 - RNA, 21 nt, RNAi
uucguuugagguguuuccgag

SEQ ID NO: 49120 - DNA, 21 bp, homo sapiens
caaactccacaaaggctcctt

SEQ ID NO: 49121 - RNA, 21 nt, RNAi
aacuccacaaaggcuccuuuu

SEQ ID NO: 49122 - RNA, 21 nt, RNAi
uuuugagguguuuccgaggaa

SEQ ID NO: 49123 - DNA, 21 bp, homo sapiens
cacaaaggctccttgaagttc

SEQ ID NO: 49124 - RNA, 21 nt, RNAi
caaaggcuccuugaaguucuu

SEQ ID NO: 49125 - RNA, 21 nt, RNAi
uuguuuccgaggaacuucaag

SEQ ID NO: 49126 - DNA, 21 bp, homo sapiens
caaaggctccttgaagttcgt

SEQ ID NO: 49127 - RNA, 21 nt, RNAi
aaggcuccuugaaguucguuu

SEQ ID NO: 49128 - RNA, 21 nt, RNAi
uuuuccgaggaacuucaagca

SEQ ID NO: 49129 - DNA, 21 bp, homo sapiens
cattgtattcctcctgagata

SEQ ID NO: 49130 - RNA, 21 nt, RNAi
uuguauuccuccugagauauu

SEQ ID NO: 49131 - RNA, 21 nt, RNAi
uuaacauaaggaggacucuau

SEQ ID NO: 49132 - DNA, 21 bp, homo sapiens
cagaactgttacataattgtg

SEQ ID NO: 49133 - RNA, 21 nt, RNAi
gaacuguuacauaauuguguu

SEQ ID NO: 49134 - RNA, 21 nt, RNAi
uucuugacaauguauuaacac

SEQ ID NO: 49135 - DNA, 21 bp, homo sapiens
cataattgtgatggacaactg

SEQ ID NO: 49136 - RNA, 21 nt, RNAi
uaauugugauggacaacuguu

SEQ ID NO: 49137 - RNA, 21 nt, RNAi
uuauuaacacuaccuguugac

SEQ ID NO: 49138 - DNA, 21 bp, homo sapiens
cacaaatggcagcttactatg

SEQ ID NO: 49139 - RNA, 21 nt, RNAi
caaauggcagcuuacuauguu

SEQ ID NO: 49140 - RNA, 21 nt, RNAi
uuguuuaccgucgaaugauac

SEQ ID NO: 49141 - DNA, 21 bp, homo sapiens
caaatggcagcttactatgag

SEQ ID NO: 49142 - RNA, 21 nt, RNAi
aauggcagcuuacuaugaguu

SEQ ID NO: 49143 - RNA, 21 nt, RNAi
uuuuaccgucgaaugauacuc

SEQ ID NO: 49144 - DNA, 21 bp, homo sapiens
cagcttactatgagcatcgtc

SEQ ID NO: 49145 - RNA, 21 nt, RNAi
gcuuacuaugagcaucgucuu

SEQ ID NO: 49146 - RNA, 21 nt, RNAi
uucgaaugauacucguagcag

SEQ ID NO: 49147 - DNA, 21 bp, homo sapiens
caaagccatttatcacttgga

SEQ ID NO: 49148 - RNA, 21 nt, RNAi
aagccauuuaucacuuggauu

SEQ ID NO: 49149 - RNA, 21 nt, RNAi
uuuucgguaaauagugaaccu

SEQ ID NO: 49150 - DNA, 21 bp, homo sapiens
catttatcacttggaagcgtt

SEQ ID NO: 49151 - RNA, 21 nt, RNAi
uuuaucacuuggaagcguuuu

SEQ ID NO: 49152 - RNA, 21 nt, RNAi
uuaaauagugaaccuucgcaa

SEQ ID NO: 49153 - DNA, 21 bp, homo sapiens
cacttggaagcgtttgtggcc

SEQ ID NO: 49154 - RNA, 21 nt, RNAi
cuuggaagcguuuguggccuu

SEQ ID NO: 49155 - RNA, 21 nt, RNAi
uugaaccuucgcaaacaccgg

SEQ ID NO: 49156 - DNA, 21 bp, homo sapiens
catggcactttataagaagtt

SEQ ID NO: 49157 - RNA, 21 nt, RNAi
uggcacuuuauaagaaguuuu

SEQ ID NO: 49158 - RNA, 21 nt, RNAi
uuaccgugaaauauucuucaa

SEQ ID NO: 49159 - DNA, 21 bp, homo sapiens
cactttataagaagttcatgg

SEQ ID NO: 49160 - RNA, 21 nt, RNAi
cuuuauaagaaguucaugguu

SEQ ID NO: 49161 - RNA, 21 nt, RNAi
uugaaauauucuucaaguacc

SEQ ID NO: 49162 - DNA, 21 bp, homo sapiens
catggaggatggattggaagg

SEQ ID NO: 49163 - RNA, 21 nt, RNAi
uggaggauggauuggaagguu

SEQ ID NO: 49164 - RNA, 21 nt, RNAi
uuaccuccuaccuaaccuucc

SEQ ID NO: 49165 - DNA, 21 bp, homo sapiens
catgatgttctgacttctgtc

SEQ ID NO: 49166 - RNA, 21 nt, RNAi
ugauguucugacuucugucuu

SEQ ID NO: 49167 - RNA, 21 nt, RNAi
uuacuacaagacugaagacag

SEQ ID NO: 49168 - DNA, 21 bp, homo sapiens
caaagatttctcagtatcagt

SEQ ID NO: 49169 - RNA, 21 nt, RNAi
aagauuucucaguaucaguuu

SEQ ID NO: 49170 - RNA, 21 nt, RNAi
uuuucuaaagagucauaguca

SEQ ID NO: 49171 - DNA, 21 bp, homo sapiens
cataacttagagactttagag

SEQ ID NO: 49172 - RNA, 21 nt, RNAi
uaacuuagagacuuuagaguu

SEQ ID NO: 49173 - RNA, 21 nt, RNAi
uuauugaaucucugaaaucuc

SEQ ID NO: 49174 - DNA, 21 bp, homo sapiens
caagtattcattgttgatcct

SEQ ID NO: 49175 - RNA, 21 nt, RNAi
aguauucauuguugauccuuu

SEQ ID NO: 49176 - RNA, 21 nt, RNAi
uuucauaaguaacaacuagga

SEQ ID NO: 49177 - DNA, 21 bp, homo sapiens
cattgttgatcctcctattct

SEQ ID NO: 49178 - RNA, 21 nt, RNAi
uuguugauccuccuauucuuu

SEQ ID NO: 49179 - RNA, 21 nt, RNAi
uuaacaacuaggaggauaaga

SEQ ID NO: 49180 - DNA, 21 bp, homo sapiens
cacctgctaaaggagatttac

SEQ ID NO: 49181 - RNA, 21 nt, RNAi
ccugcuaaaggagauuuacuu

SEQ ID NO: 49182 - RNA, 21 nt, RNAi
uuggacgauuuccucuaaaug

SEQ ID NO: 49183 - DNA, 21 bp, homo sapiens
catttatccagatgaccattt

SEQ ID NO: 49184 - RNA, 21 nt, RNAi
uuuauccagaugaccauuuuu

SEQ ID NO: 49185 - RNA, 21 nt, RNAi
uuaaauaggucuacugguaaa

SEQ ID NO: 49186 - DNA, 21 bp, homo sapiens
cacaggtaacatgattgtttg

SEQ ID NO: 49187 - RNA, 21 nt, RNAi
cagguaacaugauuguuuguu

SEQ ID NO: 49188 - RNA, 21 nt, RNAi
uuguccauuguacuaacaaac

SEQ ID NO: 49189 - DNA, 21 bp, homo sapiens
caggtaacatgattgtttgac

SEQ ID NO: 49190 - RNA, 21 nt, RNAi
gguaacaugauuguuugacuu

SEQ ID NO: 49191 - RNA, 21 nt, RNAi
uuccauuguacuaacaaacug

SEQ ID NO: 49192 - DNA, 21 bp, homo sapiens
catgattgtttgacacaccat

SEQ ID NO: 49193 - RNA, 21 nt, RNAi
ugauuguuugacacaccauuu

SEQ ID NO: 49194 - RNA, 21 nt, RNAi
uuacuaacaaacuguguggua

SEQ ID NO: 49195 - DNA, 21 bp, homo sapiens
cagataccatttctgttgagg

SEQ ID NO: 49196 - RNA, 21 nt, RNAi
gauaccauuucuguugagguu

SEQ ID NO: 49197 - RNA, 21 nt, RNAi
uucuaugguaaagacaacucc

SEQ ID NO: 49198 - DNA, 21 bp, homo sapiens
catttctgttgaggctgcaga

SEQ ID NO: 49199 - RNA, 21 nt, RNAi
uuucuguugaggcugcagauu

SEQ ID NO: 49200 - RNA, 21 nt, RNAi
uuaaagacaacuccgacgucu

SEQ ID NO: 49201 - DNA, 21 bp, homo sapiens
cagtggttcagattagtatta

SEQ ID NO: 49202 - RNA, 21 nt, RNAi
gugguucagauuaguauuauu

SEQ ID NO: 49203 - RNA, 21 nt, RNAi
uucaccaagucuaaucauaau

SEQ ID NO: 49204 - DNA, 21 bp, homo sapiens
cagattagtattaggtcggta

SEQ ID NO: 49205 - RNA, 21 nt, RNAi
gauuaguauuaggucgguauu

SEQ ID NO: 49206 - RNA, 21 nt, RNAi
uucuaaucauaauccagccau

SEQ ID NO: 49207 - DNA, 21 bp, homo sapiens
cagaatgaagttctggagaaa

SEQ ID NO: 49208 - RNA, 21 nt, RNAi
gaaugaaguucuggagaaauu

SEQ ID NO: 49209 - RNA, 21 nt, RNAi
uucuuacuucaagaccucuuu

SEQ ID NO: 49210 - DNA, 21 bp, homo sapiens
caaatttgtgtgacagactcc

SEQ ID NO: 49211 - RNA, 21 nt, RNAi
aauuugugugacagacuccuu

SEQ ID NO: 49212 - RNA, 21 nt, RNAi
uuuuaaacacacugucugagg

SEQ ID NO: 49213 - DNA, 21 bp, homo sapiens
cagactccgaacaattccttt

SEQ ID NO: 49214 - RNA, 21 nt, RNAi
gacuccgaacaauuccuuuuu

SEQ ID NO: 49215 - RNA, 21 nt, RNAi
uucugaggcuuguuaaggaaa

SEQ ID NO: 49216 - DNA, 21 bp, homo sapiens
caattcctttactacgaagta

SEQ ID NO: 49217 - RNA, 21 nt, RNAi
auuccuuuacuacgaaguauu

SEQ ID NO: 49218 - RNA, 21 nt, RNAi
uuuaaggaaaugaugcuucau

SEQ ID NO: 49219 - DNA, 21 bp, homo sapiens
caatcaaggtatagatgccgt

SEQ ID NO: 49220 - RNA, 21 nt, RNAi
aucaagguauagaugccguuu

SEQ ID NO: 49221 - RNA, 21 nt, RNAi
uuuaguuccauaucuacggca

SEQ ID NO: 49222 - DNA, 21 bp, homo sapiens
caaggtatagatgccgtcacc

SEQ ID NO: 49223 - RNA, 21 nt, RNAi
agguauagaugccgucaccuu

SEQ ID NO: 49224 - RNA, 21 nt, RNAi
uuuccauaucuacggcagugg

SEQ ID NO: 49225 - DNA, 21 bp, homo sapiens
cagatgatcactgatcttgtc

SEQ ID NO: 49226 - RNA, 21 nt, RNAi
gaugaucacugaucuugucuu

SEQ ID NO: 49227 - RNA, 21 nt, RNAi
uucuacuagugacuagaacag

SEQ ID NO: 49228 - DNA, 21 bp, homo sapiens
cactgatcttgtcattataga

SEQ ID NO: 49229 - RNA, 21 nt, RNAi
cugaucuugucauuauagauu

SEQ ID NO: 49230 - RNA, 21 nt, RNAi
uugacuagaacaguaauaucu

SEQ ID NO: 49231 - DNA, 21 bp, homo sapiens
cagatattgtaagcattcttg

SEQ ID NO: 49232 - RNA, 21 nt, RNAi
gauauuguaagcauucuuguu

SEQ ID NO: 49233 - RNA, 21 nt, RNAi
uucuauaacauucguaagaac

SEQ ID NO: 49234 - DNA, 21 bp, homo sapiens
cattctctctcattattgaga

SEQ ID NO: 49235 - RNA, 21 nt, RNAi
uucucucucauuauugagauu

SEQ ID NO: 49236 - RNA, 21 nt, RNAi
uuaagagagaguaauaacucu

SEQ ID NO: 49237 - DNA, 21 bp, homo sapiens
cacttgctgatggatctttgg

SEQ ID NO: 49238 - RNA, 21 nt, RNAi
cuugcugauggaucuuugguu

SEQ ID NO: 49239 - RNA, 21 nt, RNAi
uugaacgacuaccuagaaacc

SEQ ID NO: 49240 - DNA, 21 bp, homo sapiens
gaactcgagctgccatgagcc

SEQ ID NO: 49241 - RNA, 21 nt, RNAi
acucgagcugccaugagccuu

SEQ ID NO: 49242 - RNA, 21 nt, RNAi
uuugagcucgacgguacucgg

SEQ ID NO: 49243 - DNA, 21 bp, homo sapiens
gacggctggactatcacaagg

SEQ ID NO: 49244 - RNA, 21 nt, RNAi
cggcuggacuaucacaagguu

SEQ ID NO: 49245 - RNA, 21 nt, RNAi
uugccgaccugauaguguucc

SEQ ID NO: 49246 - DNA, 21 bp, homo sapiens
gactatcacaaggagcaggcg

SEQ ID NO: 49247 - RNA, 21 nt, RNAi
cuaucacaaggagcaggcguu

SEQ ID NO: 49248 - RNA, 21 nt, RNAi
uugauaguguuccucguccgc

SEQ ID NO: 49249 - DNA, 21 bp, homo sapiens
gaacctggtgcagtgtggtga

SEQ ID NO: 49250 - RNA, 21 nt, RNAi
accuggugcaguguggugauu

SEQ ID NO: 49251 - RNA, 21 nt, RNAi
uuuggaccacgucacaccacu

SEQ ID NO: 49252 - DNA, 21 bp, homo sapiens
gactttcctcatctgttagtg

SEQ ID NO: 49253 - RNA, 21 nt, RNAi
cuuuccucaucuguuaguguu

SEQ ID NO: 49254 - RNA, 21 nt, RNAi
uugaaaggaguagacaaucac

SEQ ID NO: 49255 - DNA, 21 bp, homo sapiens
gaattatgtgtattctacgtg

SEQ ID NO: 49256 - RNA, 21 nt, RNAi
auuauguguauucuacguguu

SEQ ID NO: 49257 - RNA, 21 nt, RNAi
uuuaauacacauaagaugcac

SEQ ID NO: 49258 - DNA, 21 bp, homo sapiens
gaactttatggtgttggagtg

SEQ ID NO: 49259 - RNA, 21 nt, RNAi
acuuuaugguguuggaguguu

SEQ ID NO: 49260 - RNA, 21 nt, RNAi
uuugaaauaccacaaccucac

SEQ ID NO: 49261 - DNA, 21 bp, homo sapiens
gagaattgaacatcagaccat

SEQ ID NO: 49262 - RNA, 21 nt, RNAi
gaauugaacaucagaccauuu

SEQ ID NO: 49263 - RNA, 21 nt, RNAi
uucuuaacuuguagucuggua

SEQ ID NO: 49264 - DNA, 21 bp, homo sapiens
gaattgaacatcagaccatca

SEQ ID NO: 49265 - RNA, 21 nt, RNAi
auugaacaucagaccaucauu

SEQ ID NO: 49266 - RNA, 21 nt, RNAi
uuuaacuuguagucugguagu

SEQ ID NO: 49267 - DNA, 21 bp, homo sapiens
gaacatcagaccatcacaact

SEQ ID NO: 49268 - RNA, 21 nt, RNAi
acaucagaccaucacaacuuu

SEQ ID NO: 49269 - RNA, 21 nt, RNAi
uuuguagucugguaguguuga

SEQ ID NO: 49270 - DNA, 21 bp, homo sapiens
gaccatcacaactccatctaa

SEQ ID NO: 49271 - RNA, 21 nt, RNAi
ccaucacaacuccaucuaauu

SEQ ID NO: 49272 - RNA, 21 nt, RNAi
uugguaguguugagguagauu

SEQ ID NO: 49273 - DNA, 21 bp, homo sapiens
gaaattagcaccattgcaagt

SEQ ID NO: 49274 - RNA, 21 nt, RNAi
aauuagcaccauugcaaguuu

SEQ ID NO: 49275 - RNA, 21 nt, RNAi
uuuuaaucgugguaacguuca

SEQ ID NO: 49276 - DNA, 21 bp, homo sapiens
gaagttaatcctagtgatgct

SEQ ID NO: 49277 - RNA, 21 nt, RNAi
aguuaauccuagugaugcuuu

SEQ ID NO: 49278 - RNA, 21 nt, RNAi
uuucaauuaggaucacuacga

SEQ ID NO: 49279 - DNA, 21 bp, homo sapiens
gatgctggaaatagtgaccga

SEQ ID NO: 49280 - RNA, 21 nt, RNAi
ugcuggaaauagugaccgauu

SEQ ID NO: 49281 - RNA, 21 nt, RNAi
uuacgaccuuuaucacuggcu

SEQ ID NO: 49282 - DNA, 21 bp, homo sapiens
gaaatagtgaccgagtagtca

SEQ ID NO: 49283 - RNA, 21 nt, RNAi
aauagugaccgaguagucauu

SEQ ID NO: 49284 - RNA, 21 nt, RNAi
uuuuaucacuggcucaucagu

SEQ ID NO: 49285 - DNA, 21 bp, homo sapiens
gaccgagtagtcattcaggag

SEQ ID NO: 49286 - RNA, 21 nt, RNAi
ccgaguagucauucaggaguu

SEQ ID NO: 49287 - RNA, 21 nt, RNAi
uuggcucaucaguaaguccuc

SEQ ID NO: 49288 - DNA, 21 bp, homo sapiens
gagtagtcattcaggagatgt

SEQ ID NO: 49289 - RNA, 21 nt, RNAi
guagucauucaggagauguuu

SEQ ID NO: 49290 - RNA, 21 nt, RNAi
uucaucaguaaguccucuaca

SEQ ID NO: 49291 - DNA, 21 bp, homo sapiens
gacagaagttgacaaactcac

SEQ ID NO: 49292 - RNA, 21 nt, RNAi
cagaaguugacaaacucacuu

SEQ ID NO: 49293 - RNA, 21 nt, RNAi
uugucuucaacuguuugagug

SEQ ID NO: 49294 - DNA, 21 bp, homo sapiens
gaagttgacaaactcaccaaa

SEQ ID NO: 49295 - RNA, 21 nt, RNAi
aguugacaaacucaccaaauu

SEQ ID NO: 49296 - RNA, 21 nt, RNAi
uuucaacuguuugagugguuu

SEQ ID NO: 49297 - DNA, 21 bp, homo sapiens
gacaaactcaccaaagatgct

SEQ ID NO: 49298 - RNA, 21 nt, RNAi
caaacucaccaaagaugcuuu

SEQ ID NO: 49299 - RNA, 21 nt, RNAi
uuguuugagugguuucuacga

SEQ ID NO: 49300 - DNA, 21 bp, homo sapiens
gatgctcagcatgccttgcga

SEQ ID NO: 49301 - RNA, 21 nt, RNAi
ugcucagcaugccuugcgauu

SEQ ID NO: 49302 - RNA, 21 nt, RNAi
uuacgagucguacggaacgcu

SEQ ID NO: 49303 - DNA, 21 bp, homo sapiens
gattgatcttgtgctgcaatt

SEQ ID NO: 49304 - RNA, 21 nt, RNAi
uugaucuugugcugcaauuuu

SEQ ID NO: 49305 - RNA, 21 nt, RNAi
uuaacuagaacacgacguuaa

SEQ ID NO: 49306 - DNA, 21 bp, homo sapiens
gatcttgtgctgcaattctac

SEQ ID NO: 49307 - RNA, 21 nt, RNAi
ucuugugcugcaauucuacuu

SEQ ID NO: 49308 - RNA, 21 nt, RNAi
uuagaacacgacguuaagaug

SEQ ID NO: 49309 - DNA, 21 bp, homo sapiens
gaagatatttgccacgtgtta

SEQ ID NO: 49310 - RNA, 21 nt, RNAi
agauauuugccacguguuauu

SEQ ID NO: 49311 - RNA, 21 nt, RNAi
uuucuauaaacggugcacaau

SEQ ID NO: 49312 - DNA, 21 bp, homo sapiens
gatatttgccacgtgttatct

SEQ ID NO: 49313 - RNA, 21 nt, RNAi
uauuugccacguguuaucuuu

SEQ ID NO: 49314 - RNA, 21 nt, RNAi
uuauaaacggugcacaauaga

SEQ ID NO: 49315 - DNA, 21 bp, homo sapiens
gaaggaaggtctgaatcttcc

SEQ ID NO: 49316 - RNA, 21 nt, RNAi
aggaaggucugaaucuuccuu

SEQ ID NO: 49317 - RNA, 21 nt, RNAi
uuuccuuccagacuuagaagg

SEQ ID NO: 49318 - DNA, 21 bp, homo sapiens
gaaggtctgaatcttccttca

SEQ ID NO: 49319 - RNA, 21 nt, RNAi
aggucugaaucuuccuucauu

SEQ ID NO: 49320 - RNA, 21 nt, RNAi
uuuccagacuuagaaggaagu

SEQ ID NO: 49321 - DNA, 21 bp, homo sapiens
gaatcttccttcacaactggc

SEQ ID NO: 49322 - RNA, 21 nt, RNAi
aucuuccuucacaacuggcuu

SEQ ID NO: 49323 - RNA, 21 nt, RNAi
uuuagaaggaaguguugaccg

SEQ ID NO: 49324 - DNA, 21 bp, homo sapiens
gacttgcagagaagtcttgta

SEQ ID NO: 49325 - RNA, 21 nt, RNAi
cuugcagagaagucuuguauu

SEQ ID NO: 49326 - RNA, 21 nt, RNAi
uugaacgucucuucagaacau

SEQ ID NO: 49327 - DNA, 21 bp, homo sapiens
gagaagtcttgtagaaatctc

SEQ ID NO: 49328 - RNA, 21 nt, RNAi
gaagucuuguagaaaucucuu

SEQ ID NO: 49329 - RNA, 21 nt, RNAi
uucuucagaacaucuuuagag

SEQ ID NO: 49330 - DNA, 21 bp, homo sapiens
gaagtcttgtagaaatctcag

SEQ ID NO: 49331 - RNA, 21 nt, RNAi
agucuuguagaaaucucaguu

SEQ ID NO: 49332 - RNA, 21 nt, RNAi
uuucagaacaucuuuagaguc

SEQ ID NO: 49333 - DNA, 21 bp, homo sapiens
gaagcctgcagagtgcaacaa

SEQ ID NO: 49334 - RNA, 21 nt, RNAi
agccugcagagugcaacaauu

SEQ ID NO: 49335 - RNA, 21 nt, RNAi
uuucggacgucucacguuguu

SEQ ID NO: 49336 - DNA, 21 bp, homo sapiens
gagactgcaaatgctattgtc

SEQ ID NO: 49337 - RNA, 21 nt, RNAi
gacugcaaaugcuauugucuu

SEQ ID NO: 49338 - RNA, 21 nt, RNAi
uucugacguuuacgauaacag

SEQ ID NO: 49339 - DNA, 21 bp, homo sapiens
gactgcaaatgctattgtcag

SEQ ID NO: 49340 - RNA, 21 nt, RNAi
cugcaaaugcuauugucaguu

SEQ ID NO: 49341 - RNA, 21 nt, RNAi
uugacguuuacgauaacaguc

SEQ ID NO: 49342 - DNA, 21 bp, homo sapiens
gaagttcgtggaaggctgtat

SEQ ID NO: 49343 - RNA, 21 nt, RNAi
aguucguggaaggcuguauuu

SEQ ID NO: 49344 - RNA, 21 nt, RNAi
uuucaagcaccuuccgacaua

SEQ ID NO: 49345 - DNA, 21 bp, homo sapiens
gaaggctgtatgagcttctaa

SEQ ID NO: 49346 - RNA, 21 nt, RNAi
aggcuguaugagcuucuaauu

SEQ ID NO: 49347 - RNA, 21 nt, RNAi
uuuccgacauacucgaagauu

SEQ ID NO: 49348 - DNA, 21 bp, homo sapiens
gagcttctaactcattgtatt

SEQ ID NO: 49349 - RNA, 21 nt, RNAi
gcuucuaacucauuguauuuu

SEQ ID NO: 49350 - RNA, 21 nt, RNAi
uucgaagauugaguaacauaa

SEQ ID NO: 49351 - DNA, 21 bp, homo sapiens
gaggtggcacaaatggcagct

SEQ ID NO: 49352 - RNA, 21 nt, RNAi
gguggcacaaauggcagcuuu

SEQ ID NO: 49353 - RNA, 21 nt, RNAi
uuccaccguguuuaccgucga

SEQ ID NO: 49354 - DNA, 21 bp, homo sapiens
gaagcgtttgtggccaaattc

SEQ ID NO: 49355 - RNA, 21 nt, RNAi
agcguuuguggccaaauucuu

SEQ ID NO: 49356 - RNA, 21 nt, RNAi
uuucgcaaacaccgguuuaag

SEQ ID NO: 49357 - DNA, 21 bp, homo sapiens
gaagttcatggaggatggatt

SEQ ID NO: 49358 - RNA, 21 nt, RNAi
aguucauggaggauggauuuu

SEQ ID NO: 49359 - RNA, 21 nt, RNAi
uuucaaguaccuccuaccuaa

SEQ ID NO: 49360 - DNA, 21 bp, homo sapiens
gaggatggattggaaggcatg

SEQ ID NO: 49361 - RNA, 21 nt, RNAi
ggauggauuggaaggcauguu

SEQ ID NO: 49362 - RNA, 21 nt, RNAi
uuccuaccuaaccuuccguac

SEQ ID NO: 49363 - DNA, 21 bp, homo sapiens
gatggattggaaggcatgatg

SEQ ID NO: 49364 - RNA, 21 nt, RNAi
uggauuggaaggcaugauguu

SEQ ID NO: 49365 - RNA, 21 nt, RNAi
uuaccuaaccuuccguacuac

SEQ ID NO: 49366 - DNA, 21 bp, homo sapiens
gattggaaggcatgatgttct

SEQ ID NO: 49367 - RNA, 21 nt, RNAi
uuggaaggcaugauguucuuu

SEQ ID NO: 49368 - RNA, 21 nt, RNAi
uuaaccuuccguacuacaaga

SEQ ID NO: 49369 - DNA, 21 bp, homo sapiens
gaaggcatgatgttctgactt

SEQ ID NO: 49370 - RNA, 21 nt, RNAi
aggcaugauguucugacuuuu

SEQ ID NO: 49371 - RNA, 21 nt, RNAi
uuuccguacuacaagacugaa

SEQ ID NO: 49372 - DNA, 21 bp, homo sapiens
gatgttctgacttctgtcagt

SEQ ID NO: 49373 - RNA, 21 nt, RNAi
uguucugacuucugucaguuu

SEQ ID NO: 49374 - RNA, 21 nt, RNAi
uuacaagacugaagacaguca

SEQ ID NO: 49375 - DNA, 21 bp, homo sapiens
gacttctgtcagttattcttg

SEQ ID NO: 49376 - RNA, 21 nt, RNAi
cuucugucaguuauucuuguu

SEQ ID NO: 49377 - RNA, 21 nt, RNAi
uugaagacagucaauaagaac

SEQ ID NO: 49378 - DNA, 21 bp, homo sapiens
gaactattaatcatcctctga

SEQ ID NO: 49379 - RNA, 21 nt, RNAi
acuauuaaucauccucugauu

SEQ ID NO: 49380 - RNA, 21 nt, RNAi
uuugauaauuaguaggagacu

SEQ ID NO: 49381 - DNA, 21 bp, homo sapiens
gagactttagagtctaagaaa

SEQ ID NO: 49382 - RNA, 21 nt, RNAi
gacuuuagagucuaagaaauu

SEQ ID NO: 49383 - RNA, 21 nt, RNAi
uucugaaaucucagauucuuu

SEQ ID NO: 49384 - DNA, 21 bp, homo sapiens
gatcctcctattctcttccgt

SEQ ID NO: 49385 - RNA, 21 nt, RNAi
uccuccuauucucuuccguuu

SEQ ID NO: 49386 - RNA, 21 nt, RNAi
uuaggaggauaagagaaggca

SEQ ID NO: 49387 - DNA, 21 bp, homo sapiens
gagatttacacattagaaagc

SEQ ID NO: 49388 - RNA, 21 nt, RNAi
gauuuacacauuagaaagcuu

SEQ ID NO: 49389 - RNA, 21 nt, RNAi
uucuaaauguguaaucuuucg

SEQ ID NO: 49390 - DNA, 21 bp, homo sapiens
gattgtttgacacaccattat

SEQ ID NO: 49391 - RNA, 21 nt, RNAi
uuguuugacacaccauuauuu

SEQ ID NO: 49392 - RNA, 21 nt, RNAi
uuaacaaacugugugguaaua

SEQ ID NO: 49393 - DNA, 21 bp, homo sapiens
gataccatttctgttgaggct

SEQ ID NO: 49394 - RNA, 21 nt, RNAi
uaccauuucuguugaggcuuu

SEQ ID NO: 49395 - RNA, 21 nt, RNAi
uuaugguaaagacaacuccga

SEQ ID NO: 49396 - DNA, 21 bp, homo sapiens
gaggctgcagatttccaactt

SEQ ID NO: 49397 - RNA, 21 nt, RNAi
ggcugcagauuuccaacuuuu

SEQ ID NO: 49398 - RNA, 21 nt, RNAi
uuccgacgucuaaagguugaa

SEQ ID NO: 49399 - DNA, 21 bp, homo sapiens
gattagtattaggtcggtact

SEQ ID NO: 49400 - RNA, 21 nt, RNAi
uuaguauuaggucgguacuuu

SEQ ID NO: 49401 - RNA, 21 nt, RNAi
uuaaucauaauccagccauga

SEQ ID NO: 49402 - DNA, 21 bp, homo sapiens
gaatgaagttctggagaaagg

SEQ ID NO: 49403 - RNA, 21 nt, RNAi
augaaguucuggagaaagguu

SEQ ID NO: 49404 - RNA, 21 nt, RNAi
uuuacuucaagaccucuuucc

SEQ ID NO: 49405 - DNA, 21 bp, homo sapiens
gaagttctggagaaaggtatg

SEQ ID NO: 49406 - RNA, 21 nt, RNAi
aguucuggagaaagguauguu

SEQ ID NO: 49407 - RNA, 21 nt, RNAi
uuucaagaccucuuuccauac

SEQ ID NO: 49408 - DNA, 21 bp, homo sapiens
gagaaaggtatgttactgtag

SEQ ID NO: 49409 - RNA, 21 nt, RNAi
gaaagguauguuacuguaguu

SEQ ID NO: 49410 - RNA, 21 nt, RNAi
uucuuuccauacaaugacauc

SEQ ID NO: 49411 - DNA, 21 bp, homo sapiens
gaaaggtatgttactgtagta

SEQ ID NO: 49412 - RNA, 21 nt, RNAi
aagguauguuacuguaguauu

SEQ ID NO: 49413 - RNA, 21 nt, RNAi
uuuuccauacaaugacaucau

SEQ ID NO: 49414 - DNA, 21 bp, homo sapiens
gacaaatttgtgtgacagact

SEQ ID NO: 49415 - RNA, 21 nt, RNAi
caaauuugugugacagacuuu

SEQ ID NO: 49416 - RNA, 21 nt, RNAi
uuguuuaaacacacugucuga

SEQ ID NO: 49417 - DNA, 21 bp, homo sapiens
gacagactccgaacaattcct

SEQ ID NO: 49418 - RNA, 21 nt, RNAi
cagacuccgaacaauuccuuu

SEQ ID NO: 49419 - RNA, 21 nt, RNAi
uugucugaggcuuguuaagga

SEQ ID NO: 49420 - DNA, 21 bp, homo sapiens
gactccgaacaattcctttac

SEQ ID NO: 49421 - RNA, 21 nt, RNAi
cuccgaacaauuccuuuacuu

SEQ ID NO: 49422 - RNA, 21 nt, RNAi
uugaggcuuguuaaggaaaug

SEQ ID NO: 49423 - DNA, 21 bp, homo sapiens
gaacaattcctttactacgaa

SEQ ID NO: 49424 - RNA, 21 nt, RNAi
acaauuccuuuacuacgaauu

SEQ ID NO: 49425 - RNA, 21 nt, RNAi
uuuguuaaggaaaugaugcuu

SEQ ID NO: 49426 - DNA, 21 bp, homo sapiens
gatgatcactgatcttgtcat

SEQ ID NO: 49427 - RNA, 21 nt, RNAi
ugaucacugaucuugucauuu

SEQ ID NO: 49428 - RNA, 21 nt, RNAi
uuacuagugacuagaacagua

SEQ ID NO: 49429 - DNA, 21 bp, homo sapiens
gatcactgatcttgtcattat

SEQ ID NO: 49430 - RNA, 21 nt, RNAi
ucacugaucuugucauuauuu

SEQ ID NO: 49431 - RNA, 21 nt, RNAi
uuagugacuagaacaguaaua

SEQ ID NO: 49432 - DNA, 21 bp, homo sapiens
gatcttgtcattatagatgag

SEQ ID NO: 49433 - RNA, 21 nt, RNAi
ucuugucauuauagaugaguu

SEQ ID NO: 49434 - RNA, 21 nt, RNAi
uuagaacaguaauaucuacuc

SEQ ID NO: 49435 - DNA, 21 bp, homo sapiens
gatattgtaagcattcttgtg

SEQ ID NO: 49436 - RNA, 21 nt, RNAi
uauuguaagcauucuuguguu

SEQ ID NO: 49437 - RNA, 21 nt, RNAi
uuauaacauucguaagaacac

SEQ ID NO: 49438 - DNA, 21 bp, homo sapiens
gagattcatccatattgttga

SEQ ID NO: 49439 - RNA, 21 nt, RNAi
gauucauccauauuguugauu

SEQ ID NO: 49440 - RNA, 21 nt, RNAi
uucuaaguagguauaacaacu

SEQ ID NO: 49441 - DNA, 21 bp, homo sapiens
gatggatctttggtttgtttc

SEQ ID NO: 49442 - RNA, 21 nt, RNAi
uggaucuuugguuuguuucuu

SEQ ID NO: 49443 - RNA, 21 nt, RNAi
uuaccuagaaaccaaacaaag

SEQ ID NO: 49444 - DNA, 21 bp, homo sapiens
gatctttggtttgtttccagg

SEQ ID NO: 49445 - RNA, 21 nt, RNAi
ucuuugguuuguuuccagguu

SEQ ID NO: 49446 - RNA, 21 nt, RNAi
uuagaaaccaaacaaaggucc

SEQ ID NO: 49447 - DNA, 21 bp, homo sapiens
tagtgtacggaccatcaggtg

SEQ ID NO: 49448 - RNA, 21 nt, RNAi
guguacggaccaucagguguu

SEQ ID NO: 49449 - RNA, 21 nt, RNAi
uucacaugccugguaguccac

SEQ ID NO: 49450 - DNA, 21 bp, homo sapiens
tacggaccatcaggtgctgga

SEQ ID NO: 49451 - RNA, 21 nt, RNAi
cggaccaucaggugcuggauu

SEQ ID NO: 49452 - RNA, 21 nt, RNAi
uugccugguaguccacgaccu

SEQ ID NO: 49453 - DNA, 21 bp, homo sapiens
tatgtgtattctacgtgaact

SEQ ID NO: 49454 - RNA, 21 nt, RNAi
uguguauucuacgugaacuuu

SEQ ID NO: 49455 - RNA, 21 nt, RNAi
uuacacauaagaugcacuuga

SEQ ID NO: 49456 - DNA, 21 bp, homo sapiens
tattctacgtgaactttatgg

SEQ ID NO: 49457 - RNA, 21 nt, RNAi
uucuacgugaacuuuaugguu

SEQ ID NO: 49458 - RNA, 21 nt, RNAi
uuaagaugcacuugaaauacc

SEQ ID NO: 49459 - DNA, 21 bp, homo sapiens
tacgtgaactttatggtgttg

SEQ ID NO: 49460 - RNA, 21 nt, RNAi
cgugaacuuuaugguguuguu

SEQ ID NO: 49461 - RNA, 21 nt, RNAi
uugcacuugaaauaccacaac

SEQ ID NO: 49462 - DNA, 21 bp, homo sapiens
tagcaccattgcaagtaacta

SEQ ID NO: 49463 - RNA, 21 nt, RNAi
gcaccauugcaaguaacuauu

SEQ ID NO: 49464 - RNA, 21 nt, RNAi
uucgugguaacguucauugau

SEQ ID NO: 49465 - DNA, 21 bp, homo sapiens
taactaccaccttgaagttaa

SEQ ID NO: 49466 - RNA, 21 nt, RNAi
acuaccaccuugaaguuaauu

SEQ ID NO: 49467 - RNA, 21 nt, RNAi
uuugaugguggaacuucaauu

SEQ ID NO: 49468 - DNA, 21 bp, homo sapiens
taccaccttgaagttaatcct

SEQ ID NO: 49469 - RNA, 21 nt, RNAi
ccaccuugaaguuaauccuuu

SEQ ID NO: 49470 - RNA, 21 nt, RNAi
uugguggaacuucaauuagga

SEQ ID NO: 49471 - DNA, 21 bp, homo sapiens
taatcctagtgatgctggaaa

SEQ ID NO: 49472 - RNA, 21 nt, RNAi
auccuagugaugcuggaaauu

SEQ ID NO: 49473 - RNA, 21 nt, RNAi
uuuaggaucacuacgaccuuu

SEQ ID NO: 49474 - DNA, 21 bp, homo sapiens
tagtgatgctggaaatagtga

SEQ ID NO: 49475 - RNA, 21 nt, RNAi
gugaugcuggaaauagugauu

SEQ ID NO: 49476 - RNA, 21 nt, RNAi
uucacuacgaccuuuaucacu

SEQ ID NO: 49477 - DNA, 21 bp, homo sapiens
tagtgaccgagtagtcattca

SEQ ID NO: 49478 - RNA, 21 nt, RNAi
gugaccgaguagucauucauu

SEQ ID NO: 49479 - RNA, 21 nt, RNAi
uucacuggcucaucaguaagu

SEQ ID NO: 49480 - DNA, 21 bp, homo sapiens
tagtcattcaggagatgttga

SEQ ID NO: 49481 - RNA, 21 nt, RNAi
gucauucaggagauguugauu

SEQ ID NO: 49482 - RNA, 21 nt, RNAi
uucaguaaguccucuacaacu

SEQ ID NO: 49483 - DNA, 21 bp, homo sapiens
tattgacagaagttgacaaac

SEQ ID NO: 49484 - RNA, 21 nt, RNAi
uugacagaaguugacaaacuu

SEQ ID NO: 49485 - RNA, 21 nt, RNAi
uuaacugucuucaacuguuug

SEQ ID NO: 49486 - DNA, 21 bp, homo sapiens
tatatgtctacctgcagattg

SEQ ID NO: 49487 - RNA, 21 nt, RNAi
uaugucuaccugcagauuguu

SEQ ID NO: 49488 - RNA, 21 nt, RNAi
uuauacagauggacgucuaac

SEQ ID NO: 49489 - DNA, 21 bp, homo sapiens
tatgtctacctgcagattgat

SEQ ID NO: 49490 - RNA, 21 nt, RNAi
ugucuaccugcagauugauuu

SEQ ID NO: 49491 - RNA, 21 nt, RNAi
uuacagauggacgucuaacua

SEQ ID NO: 49492 - DNA, 21 bp, homo sapiens
tacctgcagattgatcttgtg

SEQ ID NO: 49493 - RNA, 21 nt, RNAi
ccugcagauugaucuuguguu

SEQ ID NO: 49494 - RNA, 21 nt, RNAi
uuggacgucuaacuagaacac

SEQ ID NO: 49495 - DNA, 21 bp, homo sapiens
tattcgtagtaggtgcttggc

SEQ ID NO: 49496 - RNA, 21 nt, RNAi
uucguaguaggugcuuggcuu

SEQ ID NO: 49497 - RNA, 21 nt, RNAi
uuaagcaucauccacgaaccg

SEQ ID NO: 49498 - DNA, 21 bp, homo sapiens
tagtaggtgcttggcggttcg

SEQ ID NO: 49499 - RNA, 21 nt, RNAi
guaggugcuuggcgguucguu

SEQ ID NO: 49500 - RNA, 21 nt, RNAi
uucauccacgaaccgccaagc

SEQ ID NO: 49501 - DNA, 21 bp, homo sapiens
taggtgcttggcggttcgtgt

SEQ ID NO: 49502 - RNA, 21 nt, RNAi
ggugcuuggcgguucguguuu

SEQ ID NO: 49503 - RNA, 21 nt, RNAi
uuccacgaaccgccaagcaca

SEQ ID NO: 49504 - DNA, 21 bp, homo sapiens
tatttgccacgtgttatctac

SEQ ID NO: 49505 - RNA, 21 nt, RNAi
uuugccacguguuaucuacuu

SEQ ID NO: 49506 - RNA, 21 nt, RNAi
uuaaacggugcacaauagaug

SEQ ID NO: 49507 - DNA, 21 bp, homo sapiens
tatctactgtgtgtaagaagg

SEQ ID NO: 49508 - RNA, 21 nt, RNAi
ucuacuguguguaagaagguu

SEQ ID NO: 49509 - RNA, 21 nt, RNAi
uuagaugacacacauucuucc

SEQ ID NO: 49510 - DNA, 21 bp, homo sapiens
tactgtgtgtaagaaggaagg

SEQ ID NO: 49511 - RNA, 21 nt, RNAi
cuguguguaagaaggaagguu

SEQ ID NO: 49512 - RNA, 21 nt, RNAi
uugacacacauucuuccuucc

SEQ ID NO: 49513 - DNA, 21 bp, homo sapiens
taagaaggaaggtctgaatct

SEQ ID NO: 49514 - RNA, 21 nt, RNAi
agaaggaaggucugaaucuuu

SEQ ID NO: 49515 - RNA, 21 nt, RNAi
uuucuuccuuccagacuuaga

SEQ ID NO: 49516 - DNA, 21 bp, homo sapiens
tagacttgcagagaagtcttg

SEQ ID NO: 49517 - RNA, 21 nt, RNAi
gacuugcagagaagucuuguu

SEQ ID NO: 49518 - RNA, 21 nt, RNAi
uucugaacgucucuucagaac

SEQ ID NO: 49519 - DNA, 21 bp, homo sapiens
tatgtgtgaagcctgcagagt

SEQ ID NO: 49520 - RNA, 21 nt, RNAi
ugugugaagccugcagaguuu

SEQ ID NO: 49521 - RNA, 21 nt, RNAi
uuacacacuucggacgucuca

SEQ ID NO: 49522 - DNA, 21 bp, homo sapiens
tattgtcagtcagcaaactcc

SEQ ID NO: 49523 - RNA, 21 nt, RNAi
uugucagucagcaaacuccuu

SEQ ID NO: 49524 - RNA, 21 nt, RNAi
uuaacagucagucguuugagg

SEQ ID NO: 49525 - DNA, 21 bp, homo sapiens
tatgagcttctaactcattgt

SEQ ID NO: 49526 - RNA, 21 nt, RNAi
ugagcuucuaacucauuguuu

SEQ ID NO: 49527 - RNA, 21 nt, RNAi
uuacucgaagauugaguaaca

SEQ ID NO: 49528 - DNA, 21 bp, homo sapiens
taactcattgtattcctcctg

SEQ ID NO: 49529 - RNA, 21 nt, RNAi
acucauuguauuccuccuguu

SEQ ID NO: 49530 - RNA, 21 nt, RNAi
uuugaguaacauaaggaggac

SEQ ID NO: 49531 - DNA, 21 bp, homo sapiens
tacataattgtgatggacaac

SEQ ID NO: 49532 - RNA, 21 nt, RNAi
cauaauugugauggacaacuu

SEQ ID NO: 49533 - RNA, 21 nt, RNAi
uuguauuaacacuaccuguug

SEQ ID NO: 49534 - DNA, 21 bp, homo sapiens
taattgtgatggacaactgaa

SEQ ID NO: 49535 - RNA, 21 nt, RNAi
auugugauggacaacugaauu

SEQ ID NO: 49536 - RNA, 21 nt, RNAi
uuuaacacuaccuguugacuu

SEQ ID NO: 49537 - DNA, 21 bp, homo sapiens
tactatgagcatcgtctacag

SEQ ID NO: 49538 - RNA, 21 nt, RNAi
cuaugagcaucgucuacaguu

SEQ ID NO: 49539 - RNA, 21 nt, RNAi
uugauacucguagcagauguc

SEQ ID NO: 49540 - DNA, 21 bp, homo sapiens
tatgagcatcgtctacagctg

SEQ ID NO: 49541 - RNA, 21 nt, RNAi
ugagcaucgucuacagcuguu

SEQ ID NO: 49542 - RNA, 21 nt, RNAi
uuacucguagcagaugucgac

SEQ ID NO: 49543 - DNA, 21 bp, homo sapiens
tagcaaagccatttatcactt

SEQ ID NO: 49544 - RNA, 21 nt, RNAi
gcaaagccauuuaucacuuuu

SEQ ID NO: 49545 - RNA, 21 nt, RNAi
uucguuucgguaaauagugaa

SEQ ID NO: 49546 - DNA, 21 bp, homo sapiens
tatcacttggaagcgtttgtg

SEQ ID NO: 49547 - RNA, 21 nt, RNAi
ucacuuggaagcguuuguguu

SEQ ID NO: 49548 - RNA, 21 nt, RNAi
uuagugaaccuucgcaaacac

SEQ ID NO: 49549 - DNA, 21 bp, homo sapiens
tataagaagttcatggaggat

SEQ ID NO: 49550 - RNA, 21 nt, RNAi
uaagaaguucauggaggauuu

SEQ ID NO: 49551 - RNA, 21 nt, RNAi
uuauucuucaaguaccuccua

SEQ ID NO: 49552 - DNA, 21 bp, homo sapiens
taagaagttcatggaggatgg

SEQ ID NO: 49553 - RNA, 21 nt, RNAi
agaaguucauggaggaugguu

SEQ ID NO: 49554 - RNA, 21 nt, RNAi
uuucuucaaguaccuccuacc

SEQ ID NO: 49555 - DNA, 21 bp, homo sapiens
taactgaacttaatcatgtcg

SEQ ID NO: 49556 - RNA, 21 nt, RNAi
acugaacuuaaucaugucguu

SEQ ID NO: 49557 - RNA, 21 nt, RNAi
uuugacuugaauuaguacagc

SEQ ID NO: 49558 - DNA, 21 bp, homo sapiens
taatcatgtcgtatttgcgtt

SEQ ID NO: 49559 - RNA, 21 nt, RNAi
aucaugucguauuugcguuuu

SEQ ID NO: 49560 - RNA, 21 nt, RNAi
uuuaguacagcauaaacgcaa

SEQ ID NO: 49561 - DNA, 21 bp, homo sapiens
taacttagagactttagagtc

SEQ ID NO: 49562 - RNA, 21 nt, RNAi
acuuagagacuuuagagucuu

SEQ ID NO: 49563 - RNA, 21 nt, RNAi
uuugaaucucugaaaucucag

SEQ ID NO: 49564 - DNA, 21 bp, homo sapiens
tagagactttagagtctaaga

SEQ ID NO: 49565 - RNA, 21 nt, RNAi
gagacuuuagagucuaagauu

SEQ ID NO: 49566 - RNA, 21 nt, RNAi
uucucugaaaucucagauucu

SEQ ID NO: 49567 - DNA, 21 bp, homo sapiens
tattcattgttgatcctccta

SEQ ID NO: 49568 - RNA, 21 nt, RNAi
uucauuguugauccuccuauu

SEQ ID NO: 49569 - RNA, 21 nt, RNAi
uuaaguaacaacuaggaggau

SEQ ID NO: 49570 - DNA, 21 bp, homo sapiens
tattctcttccgtctaatctc

SEQ ID NO: 49571 - RNA, 21 nt, RNAi
uucucuuccgucuaaucucuu

SEQ ID NO: 49572 - RNA, 21 nt, RNAi
uuaagagaaggcagauuagag

SEQ ID NO: 49573 - DNA, 21 bp, homo sapiens
taatctctcacctgctaaagg

SEQ ID NO: 49574 - RNA, 21 nt, RNAi
aucucucaccugcuaaagguu

SEQ ID NO: 49575 - RNA, 21 nt, RNAi
uuuagagaguggacgauuucc

SEQ ID NO: 49576 - DNA, 21 bp, homo sapiens
taacatgattgtttgacacac

SEQ ID NO: 49577 - RNA, 21 nt, RNAi
acaugauuguuugacacacuu

SEQ ID NO: 49578 - RNA, 21 nt, RNAi
uuuguacuaacaaacugugug

SEQ ID NO: 49579 - DNA, 21 bp, homo sapiens
taccatttctgttgaggctgc

SEQ ID NO: 49580 - RNA, 21 nt, RNAi
ccauuucuguugaggcugcuu

SEQ ID NO: 49581 - RNA, 21 nt, RNAi
uugguaaagacaacuccgacg

SEQ ID NO: 49582 - DNA, 21 bp, homo sapiens
tatttcagtggttcagattag

SEQ ID NO: 49583 - RNA, 21 nt, RNAi
uuucagugguucagauuaguu

SEQ ID NO: 49584 - RNA, 21 nt, RNAi
uuaaagucaccaagucuaauc

SEQ ID NO: 49585 - DNA, 21 bp, homo sapiens
tagtattaggtcggtactaag

SEQ ID NO: 49586 - RNA, 21 nt, RNAi
guauuaggucgguacuaaguu

SEQ ID NO: 49587 - RNA, 21 nt, RNAi
uucauaauccagccaugauuc

SEQ ID NO: 49588 - DNA, 21 bp, homo sapiens
tattaggtcggtactaagaaa

SEQ ID NO: 49589 - RNA, 21 nt, RNAi
uuaggucgguacuaagaaauu

SEQ ID NO: 49590 - RNA, 21 nt, RNAi
uuaauccagccaugauucuuu

SEQ ID NO: 49591 - DNA, 21 bp, homo sapiens
taggtcggtactaagaaataa

SEQ ID NO: 49592 - RNA, 21 nt, RNAi
ggucgguacuaagaaauaauu

SEQ ID NO: 49593 - RNA, 21 nt, RNAi
uuccagccaugauucuuuauu

SEQ ID NO: 49594 - DNA, 21 bp, homo sapiens
taagtacttgagactcttgaa

SEQ ID NO: 49595 - RNA, 21 nt, RNAi
aguacuugagacucuugaauu

SEQ ID NO: 49596 - RNA, 21 nt, RNAi
uuucaugaacucugagaacuu

SEQ ID NO: 49597 - DNA, 21 bp, homo sapiens
tacttgagactcttgaagaaa

SEQ ID NO: 49598 - RNA, 21 nt, RNAi
cuugagacucuugaagaaauu

SEQ ID NO: 49599 - RNA, 21 nt, RNAi
uugaacucugagaacuucuuu

SEQ ID NO: 49600 - DNA, 21 bp, homo sapiens
tacttgacaaatttgtgtgac

SEQ ID NO: 49601 - RNA, 21 nt, RNAi
cuugacaaauuugugugacuu

SEQ ID NO: 49602 - RNA, 21 nt, RNAi
uugaacuguuuaaacacacug

SEQ ID NO: 49603 - DNA, 21 bp, homo sapiens
taaagcctattcacttgctga

SEQ ID NO: 49604 - RNA, 21 nt, RNAi
aagccuauucacuugcugauu

SEQ ID NO: 49605 - RNA, 21 nt, RNAi
uuuucggauaagugaacgacu

SEQ ID NO: 49606 - DNA, 21 bp, homo sapiens
tattcacttgctgatggatct

SEQ ID NO: 49607 - RNA, 21 nt, RNAi
uucacuugcugauggaucuuu

SEQ ID NO: 49608 - RNA, 21 nt, RNAi
uuaagugaacgacuaccuaga

SEQ ID NO: 49609 - DNA, 21 bp, homo sapiens
aagtaactaccaccttgaagt

SEQ ID NO: 49610 - RNA, 21 nt, RNAi
guaacuaccaccuugaaguuu

SEQ ID NO: 49611 - RNA, 21 nt, RNAi
uucauugaugguggaacuuca

SEQ ID NO: 49612 - DNA, 21 bp, homo sapiens
aaatagtgaccgagtagtcat

SEQ ID NO: 49613 - RNA, 21 nt, RNAi
auagugaccgaguagucauuu

SEQ ID NO: 49614 - RNA, 21 nt, RNAi
uuuaucacuggcucaucagua

SEQ ID NO: 49615 - DNA, 21 bp, homo sapiens
aaatatatgtctacctgcaga

SEQ ID NO: 49616 - RNA, 21 nt, RNAi
auauaugucuaccugcagauu

SEQ ID NO: 49617 - RNA, 21 nt, RNAi
uuuauauacagauggacgucu

SEQ ID NO: 49618 - DNA, 21 bp, homo sapiens
aatatatgtctacctgcagat

SEQ ID NO: 49619 - RNA, 21 nt, RNAi
uauaugucuaccugcagauuu

SEQ ID NO: 49620 - RNA, 21 nt, RNAi
uuauauacagauggacgucua

SEQ ID NO: 49621 - DNA, 21 bp, homo sapiens
aaaggctccttgaagttcgtg

SEQ ID NO: 49622 - RNA, 21 nt, RNAi
aggcuccuugaaguucguguu

SEQ ID NO: 49623 - RNA, 21 nt, RNAi
uuuccgaggaacuucaagcac

SEQ ID NO: 49624 - DNA, 21 bp, homo sapiens
aagttcgtggaaggctgtatg

SEQ ID NO: 49625 - RNA, 21 nt, RNAi
guucguggaaggcuguauguu

SEQ ID NO: 49626 - RNA, 21 nt, RNAi
uucaagcaccuuccgacauac

SEQ ID NO: 49627 - DNA, 21 bp, homo sapiens
aattgtgatggacaactgaaa

SEQ ID NO: 49628 - RNA, 21 nt, RNAi
uugugauggacaacugaaauu

SEQ ID NO: 49629 - RNA, 21 nt, RNAi
uuaacacuaccuguugacuuu

SEQ ID NO: 49630 - DNA, 21 bp, homo sapiens
aaatggcagcttactatgagc

SEQ ID NO: 49631 - RNA, 21 nt, RNAi
auggcagcuuacuaugagcuu

SEQ ID NO: 49632 - RNA, 21 nt, RNAi
uuuaccgucgaaugauacucg

SEQ ID NO: 49633 - DNA, 21 bp, homo sapiens
aatggcagcttactatgagca

SEQ ID NO: 49634 - RNA, 21 nt, RNAi
uggcagcuuacuaugagcauu

SEQ ID NO: 49635 - RNA, 21 nt, RNAi
uuaccgucgaaugauacucgu

SEQ ID NO: 49636 - DNA, 21 bp, homo sapiens
caccattgcaagtaactacca

SEQ ID NO: 49637 - RNA, 21 nt, RNAi
ccauugcaaguaacuaccauu

SEQ ID NO: 49638 - RNA, 21 nt, RNAi
uugguaacguucauugauggu

SEQ ID NO: 49639 - DNA, 21 bp, homo sapiens
caagtaactaccaccttgaag

SEQ ID NO: 49640 - RNA, 21 nt, RNAi
aguaacuaccaccuugaaguu

SEQ ID NO: 49641 - RNA, 21 nt, RNAi
uuucauugaugguggaacuuc

SEQ ID NO: 49642 - DNA, 21 bp, homo sapiens
catgccttgcgaagaaccatg

SEQ ID NO: 49643 - RNA, 21 nt, RNAi
ugccuugcgaagaaccauguu

SEQ ID NO: 49644 - RNA, 21 nt, RNAi
uuacggaacgcuucuugguac

SEQ ID NO: 49645 - DNA, 21 bp, homo sapiens
cacctattcgtagtaggtgct

SEQ ID NO: 49646 - RNA, 21 nt, RNAi
ccuauucguaguaggugcuuu

SEQ ID NO: 49647 - RNA, 21 nt, RNAi
uuggauaagcaucauccacga

SEQ ID NO: 49648 - DNA, 21 bp, homo sapiens
caaaggctccttgaagttcgt

SEQ ID NO: 49649 - RNA, 21 nt, RNAi
aaggcuccuugaaguucguuu

SEQ ID NO: 49650 - RNA, 21 nt, RNAi
uuuuccgaggaacuucaagca

SEQ ID NO: 49651 - DNA, 21 bp, homo sapiens
cacaaatggcagcttactatg

SEQ ID NO: 49652 - RNA, 21 nt, RNAi
caaauggcagcuuacuauguu

SEQ ID NO: 49653 - RNA, 21 nt, RNAi
uuguuuaccgucgaaugauac

SEQ ID NO: 49654 - DNA, 21 bp, homo sapiens
caaatggcagcttactatgag

SEQ ID NO: 49655 - RNA, 21 nt, RNAi
aauggcagcuuacuaugaguu

SEQ ID NO: 49656 - RNA, 21 nt, RNAi
uuuuaccgucgaaugauacuc

SEQ ID NO: 49657 - DNA, 21 bp, homo sapiens
cagcttactatgagcatcgtc

SEQ ID NO: 49658 - RNA, 21 nt, RNAi
gcuuacuaugagcaucgucuu

SEQ ID NO: 49659 - RNA, 21 nt, RNAi
uucgaaugauacucguagcag

SEQ ID NO: 49660 - DNA, 21 bp, homo sapiens
gaaatagtgaccgagtagtca

SEQ ID NO: 49661 - RNA, 21 nt, RNAi
aauagugaccgaguagucauu

SEQ ID NO: 49662 - RNA, 21 nt, RNAi
uuuuaucacuggcucaucagu

SEQ ID NO: 49663 - DNA, 21 bp, homo sapiens
gaagatatttgccacgtgtta

SEQ ID NO: 49664 - RNA, 21 nt, RNAi
agauauuugccacguguuauu

SEQ ID NO: 49665 - RNA, 21 nt, RNAi
uuucuauaaacggugcacaau

SEQ ID NO: 49666 - DNA, 21 bp, homo sapiens
gaagttcgtggaaggctgtat

SEQ ID NO: 49667 - RNA, 21 nt, RNAi
aguucguggaaggcuguauuu

SEQ ID NO: 49668 - RNA, 21 nt, RNAi
uuucaagcaccuuccgacaua

SEQ ID NO: 49669 - DNA, 21 bp, homo sapiens
tagcaccattgcaagtaacta

SEQ ID NO: 49670 - RNA, 21 nt, RNAi
gcaccauugcaaguaacuauu

SEQ ID NO: 49671 - RNA, 21 nt, RNAi
uucgugguaacguucauugau

SEQ ID NO: 49672 - DNA, 21 bp, homo sapiens
tatatgtctacctgcagattg

SEQ ID NO: 49673 - RNA, 21 nt, RNAi
uaugucuaccugcagauuguu

SEQ ID NO: 49674 - RNA, 21 nt, RNAi
uuauacagauggacgucuaac

SEQ ID NO: 49675 - DNA, 21 bp, homo sapiens
tattgtcagtcagcaaactcc

SEQ ID NO: 49676 - RNA, 21 nt, RNAi
uugucagucagcaaacuccuu

SEQ ID NO: 49677 - RNA, 21 nt, RNAi
uuaacagucagucguuugagg

SEQ ID NO: 49678 - DNA, 21 bp, homo sapiens
tactatgagcatcgtctacag

SEQ ID NO: 49679 - RNA, 21 nt, RNAi
cuaugagcaucgucuacaguu

SEQ ID NO: 49680 - RNA, 21 nt, RNAi
uugauacucguagcagauguc

SEQ ID NO: 49681 - DNA, 21 bp, homo sapiens
tagcaaagccatttatcactt

SEQ ID NO: 49682 - RNA, 21 nt, RNAi
gcaaagccauuuaucacuuuu

SEQ ID NO: 49683 - RNA, 21 nt, RNAi
uucguuucgguaaauagugaa

SEQ ID NO: 49684 - DNA, 21 bp, homo sapiens
aacctccaaggcttgctgcag

SEQ ID NO: 49685 - RNA, 21 nt, RNAi
ccuccaaggcuugcugcaguu

SEQ ID NO: 49686 - RNA, 21 nt, RNAi
uuggagguuccgaacgacguc

SEQ ID NO: 49687 - DNA, 21 bp, homo sapiens
aaggcttgctgcagatggcca

SEQ ID NO: 49688 - RNA, 21 nt, RNAi
ggcuugcugcagauggccauu

SEQ ID NO: 49689 - RNA, 21 nt, RNAi
uuccgaacgacgucuaccggu

SEQ ID NO: 49690 - DNA, 21 bp, homo sapiens
aaccgatgagtgaggagaggc

SEQ ID NO: 49691 - RNA, 21 nt, RNAi
ccgaugagugaggagaggcuu

SEQ ID NO: 49692 - RNA, 21 nt, RNAi
uuggcuacucacuccucuccg

SEQ ID NO: 49693 - DNA, 21 bp, homo sapiens
aagagctgcctccgagtgctg

SEQ ID NO: 49694 - RNA, 21 nt, RNAi
gagcugccuccgagugcuguu

SEQ ID NO: 49695 - RNA, 21 nt, RNAi
uucucgacggaggcucacgac

SEQ ID NO: 49696 - DNA, 21 bp, homo sapiens
aacatggacaatgccgcagac

SEQ ID NO: 49697 - RNA, 21 nt, RNAi
cauggacaaugccgcagacuu

SEQ ID NO: 49698 - RNA, 21 nt, RNAi
uuguaccuguuacggcgucug

SEQ ID NO: 49699 - DNA, 21 bp, homo sapiens
aatgccgcagacttctgccag

SEQ ID NO: 49700 - RNA, 21 nt, RNAi
ugccgcagacuucugccaguu

SEQ ID NO: 49701 - RNA, 21 nt, RNAi
uuacggcgucugaagacgguc

SEQ ID NO: 49702 - DNA, 21 bp, homo sapiens
aacgtggcagccatccaggag

SEQ ID NO: 49703 - RNA, 21 nt, RNAi
cguggcagccauccaggaguu

SEQ ID NO: 49704 - RNA, 21 nt, RNAi
uugcaccgucgguagguccuc

SEQ ID NO: 49705 - DNA, 21 bp, homo sapiens
aagctcaaggtcaaatcagca

SEQ ID NO: 49706 - RNA, 21 nt, RNAi
gcucaaggucaaaucagcauu

SEQ ID NO: 49707 - RNA, 21 nt, RNAi
uucgaguuccaguuuagucgu

SEQ ID NO: 49708 - DNA, 21 bp, homo sapiens
aaggtcaaatcagcattcctg

SEQ ID NO: 49709 - RNA, 21 nt, RNAi
ggucaaaucagcauuccuguu

SEQ ID NO: 49710 - RNA, 21 nt, RNAi
uuccaguuuagucguaaggac

SEQ ID NO: 49711 - DNA, 21 bp, homo sapiens
aaatcagcattcctgctgcag

SEQ ID NO: 49712 - RNA, 21 nt, RNAi
aucagcauuccugcugcaguu

SEQ ID NO: 49713 - RNA, 21 nt, RNAi
uuuagucguaaggacgacguc

SEQ ID NO: 49714 - DNA, 21 bp, homo sapiens
aatcagcattcctgctgcaga

SEQ ID NO: 49715 - RNA, 21 nt, RNAi
ucagcauuccugcugcagauu

SEQ ID NO: 49716 - RNA, 21 nt, RNAi
uuagucguaaggacgacgucu

SEQ ID NO: 49717 - DNA, 21 bp, homo sapiens
aaagctgctacagacctgttt

SEQ ID NO: 49718 - RNA, 21 nt, RNAi
agcugcuacagaccuguuuuu

SEQ ID NO: 49719 - RNA, 21 nt, RNAi
uuucgacgaugucuggacaaa

SEQ ID NO: 49720 - DNA, 21 bp, homo sapiens
aagctgctacagacctgtttc

SEQ ID NO: 49721 - RNA, 21 nt, RNAi
gcugcuacagaccuguuucuu

SEQ ID NO: 49722 - RNA, 21 nt, RNAi
uucgacgaugucuggacaaag

SEQ ID NO: 49723 - DNA, 21 bp, homo sapiens
aaaggcaccagctccttggac

SEQ ID NO: 49724 - RNA, 21 nt, RNAi
aggcaccagcuccuuggacuu

SEQ ID NO: 49725 - RNA, 21 nt, RNAi
uuuccguggucgaggaaccug

SEQ ID NO: 49726 - DNA, 21 bp, homo sapiens
aaggcaccagctccttggacc

SEQ ID NO: 49727 - RNA, 21 nt, RNAi
ggcaccagcuccuuggaccuu

SEQ ID NO: 49728 - RNA, 21 nt, RNAi
uuccguggucgaggaaccugg

SEQ ID NO: 49729 - DNA, 21 bp, homo sapiens
cagagtcaggtgcggacgact

SEQ ID NO: 49730 - RNA, 21 nt, RNAi
gagucaggugcggacgacuuu

SEQ ID NO: 49731 - RNA, 21 nt, RNAi
uucucaguccacgccugcuga

SEQ ID NO: 49732 - DNA, 21 bp, homo sapiens
caggtgcggacgactttgtct

SEQ ID NO: 49733 - RNA, 21 nt, RNAi
ggugcggacgacuuugucuuu

SEQ ID NO: 49734 - RNA, 21 nt, RNAi
uuccacgccugcugaaacaga

SEQ ID NO: 49735 - DNA, 21 bp, homo sapiens
catcaggacgccagagctgct

SEQ ID NO: 49736 - RNA, 21 nt, RNAi
ucaggacgccagagcugcuuu

SEQ ID NO: 49737 - RNA, 21 nt, RNAi
uuaguccugcggucucgacga

SEQ ID NO: 49738 - DNA, 21 bp, homo sapiens
caggacgccagagctgcttca

SEQ ID NO: 49739 - RNA, 21 nt, RNAi
ggacgccagagcugcuucauu

SEQ ID NO: 49740 - RNA, 21 nt, RNAi
uuccugcggucucgacgaagu

SEQ ID NO: 49741 - DNA, 21 bp, homo sapiens
cagagctgcttcagcggtgac

SEQ ID NO: 49742 - RNA, 21 nt, RNAi
gagcugcuucagcggugacuu

SEQ ID NO: 49743 - RNA, 21 nt, RNAi
uucucgacgaagucgccacug

SEQ ID NO: 49744 - DNA, 21 bp, homo sapiens
catgtcagacgaaggctcaag

SEQ ID NO: 49745 - RNA, 21 nt, RNAi
ugucagacgaaggcucaaguu

SEQ ID NO: 49746 - RNA, 21 nt, RNAi
uuacagucugcuuccgaguuc

SEQ ID NO: 49747 - DNA, 21 bp, homo sapiens
cacgcaacctccaaggcttgc

SEQ ID NO: 49748 - RNA, 21 nt, RNAi
cgcaaccuccaaggcuugcuu

SEQ ID NO: 49749 - RNA, 21 nt, RNAi
uugcguuggagguuccgaacg

SEQ ID NO: 49750 - DNA, 21 bp, homo sapiens
caacctccaaggcttgctgca

SEQ ID NO: 49751 - RNA, 21 nt, RNAi
accuccaaggcuugcugcauu

SEQ ID NO: 49752 - RNA, 21 nt, RNAi
uuuggagguuccgaacgacgu

SEQ ID NO: 49753 - DNA, 21 bp, homo sapiens
caaggcttgctgcagatggcc

SEQ ID NO: 49754 - RNA, 21 nt, RNAi
aggcuugcugcagauggccuu

SEQ ID NO: 49755 - RNA, 21 nt, RNAi
uuuccgaacgacgucuaccgg

SEQ ID NO: 49756 - DNA, 21 bp, homo sapiens
cagaaccgatgagtgaggaga

SEQ ID NO: 49757 - RNA, 21 nt, RNAi
gaaccgaugagugaggagauu

SEQ ID NO: 49758 - RNA, 21 nt, RNAi
uucuuggcuacucacuccucu

SEQ ID NO: 49759 - DNA, 21 bp, homo sapiens
cagatgaagagctgcctccga

SEQ ID NO: 49760 - RNA, 21 nt, RNAi
gaugaagagcugccuccgauu

SEQ ID NO: 49761 - RNA, 21 nt, RNAi
uucuacuucucgacggaggcu

SEQ ID NO: 49762 - DNA, 21 bp, homo sapiens
catggacaatgccgcagactt

SEQ ID NO: 49763 - RNA, 21 nt, RNAi
uggacaaugccgcagacuuuu

SEQ ID NO: 49764 - RNA, 21 nt, RNAi
uuaccuguuacggcgucugaa

SEQ ID NO: 49765 - DNA, 21 bp, homo sapiens
caatgccgcagacttctgcca

SEQ ID NO: 49766 - RNA, 21 nt, RNAi
augccgcagacuucugccauu

SEQ ID NO: 49767 - RNA, 21 nt, RNAi
uuuacggcgucugaagacggu

SEQ ID NO: 49768 - DNA, 21 bp, homo sapiens
cagacttctgccagctgtctg

SEQ ID NO: 49769 - RNA, 21 nt, RNAi
gacuucugccagcugucuguu

SEQ ID NO: 49770 - RNA, 21 nt, RNAi
uucugaagacggucgacagac

SEQ ID NO: 49771 - DNA, 21 bp, homo sapiens
cagctgtctggcatgcacctg

SEQ ID NO: 49772 - RNA, 21 nt, RNAi
gcugucuggcaugcaccuguu

SEQ ID NO: 49773 - RNA, 21 nt, RNAi
uucgacagaccguacguggac

SEQ ID NO: 49774 - DNA, 21 bp, homo sapiens
cacagctcatcggcacgtgca

SEQ ID NO: 49775 - RNA, 21 nt, RNAi
cagcucaucggcacgugcauu

SEQ ID NO: 49776 - RNA, 21 nt, RNAi
uugucgaguagccgugcacgu

SEQ ID NO: 49777 - DNA, 21 bp, homo sapiens
cagctcatcggcacgtgcagt

SEQ ID NO: 49778 - RNA, 21 nt, RNAi
gcucaucggcacgugcaguuu

SEQ ID NO: 49779 - RNA, 21 nt, RNAi
uucgaguagccgugcacguca

SEQ ID NO: 49780 - DNA, 21 bp, homo sapiens
catcggcacgtgcagtcagaa

SEQ ID NO: 49781 - RNA, 21 nt, RNAi
ucggcacgugcagucagaauu

SEQ ID NO: 49782 - RNA, 21 nt, RNAi
uuagccgugcacgucagucuu

SEQ ID NO: 49783 - DNA, 21 bp, homo sapiens
cacgtgcagtcagaacgtggc

SEQ ID NO: 49784 - RNA, 21 nt, RNAi
cgugcagucagaacguggcuu

SEQ ID NO: 49785 - RNA, 21 nt, RNAi
uugcacgucagucuugcaccg

SEQ ID NO: 49786 - DNA, 21 bp, homo sapiens
cagtcagaacgtggcagccat

SEQ ID NO: 49787 - RNA, 21 nt, RNAi
gucagaacguggcagccauuu

SEQ ID NO: 49788 - RNA, 21 nt, RNAi
uucagucuugcaccgucggua

SEQ ID NO: 49789 - DNA, 21 bp, homo sapiens
cagaacgtggcagccatccag

SEQ ID NO: 49790 - RNA, 21 nt, RNAi
gaacguggcagccauccaguu

SEQ ID NO: 49791 - RNA, 21 nt, RNAi
uucuugcaccgucgguagguc

SEQ ID NO: 49792 - DNA, 21 bp, homo sapiens
catctcctgtctggtccgaga

SEQ ID NO: 49793 - RNA, 21 nt, RNAi
ucuccugucugguccgagauu

SEQ ID NO: 49794 - RNA, 21 nt, RNAi
uuagaggacagaccaggcucu

SEQ ID NO: 49795 - DNA, 21 bp, homo sapiens
catgcagcagcaggtgcagaa

SEQ ID NO: 49796 - RNA, 21 nt, RNAi
ugcagcagcaggugcagaauu

SEQ ID NO: 49797 - RNA, 21 nt, RNAi
uuacgucgucguccacgucuu

SEQ ID NO: 49798 - DNA, 21 bp, homo sapiens
cagcagcaggtgcagaagctc

SEQ ID NO: 49799 - RNA, 21 nt, RNAi
gcagcaggugcagaagcucuu

SEQ ID NO: 49800 - RNA, 21 nt, RNAi
uucgucguccacgucuucgag

SEQ ID NO: 49801 - DNA, 21 bp, homo sapiens
cagcaggtgcagaagctcaag

SEQ ID NO: 49802 - RNA, 21 nt, RNAi
gcaggugcagaagcucaaguu

SEQ ID NO: 49803 - RNA, 21 nt, RNAi
uucguccacgucuucgaguuc

SEQ ID NO: 49804 - DNA, 21 bp, homo sapiens
caggtgcagaagctcaaggtc

SEQ ID NO: 49805 - RNA, 21 nt, RNAi
ggugcagaagcucaaggucuu

SEQ ID NO: 49806 - RNA, 21 nt, RNAi
uuccacgucuucgaguuccag

SEQ ID NO: 49807 - DNA, 21 bp, homo sapiens
cagaagctcaaggtcaaatca

SEQ ID NO: 49808 - RNA, 21 nt, RNAi
gaagcucaaggucaaaucauu

SEQ ID NO: 49809 - RNA, 21 nt, RNAi
uucuucgaguuccaguuuagu

SEQ ID NO: 49810 - DNA, 21 bp, homo sapiens
caaggtcaaatcagcattcct

SEQ ID NO: 49811 - RNA, 21 nt, RNAi
aggucaaaucagcauuccuuu

SEQ ID NO: 49812 - RNA, 21 nt, RNAi
uuuccaguuuagucguaagga

SEQ ID NO: 49813 - DNA, 21 bp, homo sapiens
caaatcagcattcctgctgca

SEQ ID NO: 49814 - RNA, 21 nt, RNAi
aaucagcauuccugcugcauu

SEQ ID NO: 49815 - RNA, 21 nt, RNAi
uuuuagucguaaggacgacgu

SEQ ID NO: 49816 - DNA, 21 bp, homo sapiens
cagcattcctgctgcagaacc

SEQ ID NO: 49817 - RNA, 21 nt, RNAi
gcauuccugcugcagaaccuu

SEQ ID NO: 49818 - RNA, 21 nt, RNAi
uucguaaggacgacgucuugg

SEQ ID NO: 49819 - DNA, 21 bp, homo sapiens
cattcctgctgcagaacctgc

SEQ ID NO: 49820 - RNA, 21 nt, RNAi
uuccugcugcagaaccugcuu

SEQ ID NO: 49821 - RNA, 21 nt, RNAi
uuaaggacgacgucuuggacg

SEQ ID NO: 49822 - DNA, 21 bp, homo sapiens
cagcctggtgacagactttcc

SEQ ID NO: 49823 - RNA, 21 nt, RNAi
gccuggugacagacuuuccuu

SEQ ID NO: 49824 - RNA, 21 nt, RNAi
uucggaccacugucugaaagg

SEQ ID NO: 49825 - DNA, 21 bp, homo sapiens
cagctgctgcagcagcatgag

SEQ ID NO: 49826 - RNA, 21 nt, RNAi
gcugcugcagcagcaugaguu

SEQ ID NO: 49827 - RNA, 21 nt, RNAi
uucgacgacgucgucguacuc

SEQ ID NO: 49828 - DNA, 21 bp, homo sapiens
cagcagcatgaggagtaccag

SEQ ID NO: 49829 - RNA, 21 nt, RNAi
gcagcaugaggaguaccaguu

SEQ ID NO: 49830 - RNA, 21 nt, RNAi
uucgucguacuccucaugguc

SEQ ID NO: 49831 - DNA, 21 bp, homo sapiens
cagcatgaggagtaccaggag

SEQ ID NO: 49832 - RNA, 21 nt, RNAi
gcaugaggaguaccaggaguu

SEQ ID NO: 49833 - RNA, 21 nt, RNAi
uucguacuccucaugguccuc

SEQ ID NO: 49834 - DNA, 21 bp, homo sapiens
catgaggagtaccaggaggag

SEQ ID NO: 49835 - RNA, 21 nt, RNAi
ugaggaguaccaggaggaguu

SEQ ID NO: 49836 - RNA, 21 nt, RNAi
uuacuccucaugguccuccuc

SEQ ID NO: 49837 - DNA, 21 bp, homo sapiens
caggaggagctggagttctgt

SEQ ID NO: 49838 - RNA, 21 nt, RNAi
ggaggagcuggaguucuguuu

SEQ ID NO: 49839 - RNA, 21 nt, RNAi
uuccuccucgaccucaagaca

SEQ ID NO: 49840 - DNA, 21 bp, homo sapiens
cagcggacgacagcatggatc

SEQ ID NO: 49841 - RNA, 21 nt, RNAi
gcggacgacagcauggaucuu

SEQ ID NO: 49842 - RNA, 21 nt, RNAi
uucgccugcugucguaccuag

SEQ ID NO: 49843 - DNA, 21 bp, homo sapiens
cagcatggatcggtgaaacca

SEQ ID NO: 49844 - RNA, 21 nt, RNAi
gcauggaucggugaaaccauu

SEQ ID NO: 49845 - RNA, 21 nt, RNAi
uucguaccuagccacuuuggu

SEQ ID NO: 49846 - DNA, 21 bp, homo sapiens
catggatcggtgaaaccaggt

SEQ ID NO: 49847 - RNA, 21 nt, RNAi
uggaucggugaaaccagguuu

SEQ ID NO: 49848 - RNA, 21 nt, RNAi
uuaccuagccacuuuggucca

SEQ ID NO: 49849 - DNA, 21 bp, homo sapiens
cacacagctcttccaataaag

SEQ ID NO: 49850 - RNA, 21 nt, RNAi
cacagcucuuccaauaaaguu

SEQ ID NO: 49851 - RNA, 21 nt, RNAi
uugugucgagaagguuauuuc

SEQ ID NO: 49852 - DNA, 21 bp, homo sapiens
cacagctcttccaataaaggt

SEQ ID NO: 49853 - RNA, 21 nt, RNAi
cagcucuuccaauaaagguuu

SEQ ID NO: 49854 - RNA, 21 nt, RNAi
uugucgagaagguuauuucca

SEQ ID NO: 49855 - DNA, 21 bp, homo sapiens
cagctcttccaataaaggtgt

SEQ ID NO: 49856 - RNA, 21 nt, RNAi
gcucuuccaauaaagguguuu

SEQ ID NO: 49857 - RNA, 21 nt, RNAi
uucgagaagguuauuuccaca

SEQ ID NO: 49858 - DNA, 21 bp, homo sapiens
caataaaggtgtttctcttca

SEQ ID NO: 49859 - RNA, 21 nt, RNAi
auaaagguguuucucuucauu

SEQ ID NO: 49860 - RNA, 21 nt, RNAi
uuuauuuccacaaagagaagu

SEQ ID NO: 49861 - DNA, 21 bp, homo sapiens
gagtcaggtgcggacgacttt

SEQ ID NO: 49862 - RNA, 21 nt, RNAi
gucaggugcggacgacuuuuu

SEQ ID NO: 49863 - RNA, 21 nt, RNAi
uucaguccacgccugcugaaa

SEQ ID NO: 49864 - DNA, 21 bp, homo sapiens
gacgactttgtctgtaggagc

SEQ ID NO: 49865 - RNA, 21 nt, RNAi
cgacuuugucuguaggagcuu

SEQ ID NO: 49866 - RNA, 21 nt, RNAi
uugcugaaacagacauccucg

SEQ ID NO: 49867 - DNA, 21 bp, homo sapiens
gactttgtctgtaggagcagc

SEQ ID NO: 49868 - RNA, 21 nt, RNAi
cuuugucuguaggagcagcuu

SEQ ID NO: 49869 - RNA, 21 nt, RNAi
uugaaacagacauccucgucg

SEQ ID NO: 49870 - DNA, 21 bp, homo sapiens
gagctgcttcagcggtgacca

SEQ ID NO: 49871 - RNA, 21 nt, RNAi
gcugcuucagcggugaccauu

SEQ ID NO: 49872 - RNA, 21 nt, RNAi
uucgacgaagucgccacuggu

SEQ ID NO: 49873 - DNA, 21 bp, homo sapiens
gaaccgatgagtgaggagagg

SEQ ID NO: 49874 - RNA, 21 nt, RNAi
accgaugagugaggagagguu

SEQ ID NO: 49875 - RNA, 21 nt, RNAi
uuuggcuacucacuccucucc

SEQ ID NO: 49876 - DNA, 21 bp, homo sapiens
gatgagtgaggagaggcgtca

SEQ ID NO: 49877 - RNA, 21 nt, RNAi
ugagugaggagaggcgucauu

SEQ ID NO: 49878 - RNA, 21 nt, RNAi
uuacucacuccucuccgcagu

SEQ ID NO: 49879 - DNA, 21 bp, homo sapiens
gagtgaggagaggcgtcagtg

SEQ ID NO: 49880 - RNA, 21 nt, RNAi
gugaggagaggcgucaguguu

SEQ ID NO: 49881 - RNA, 21 nt, RNAi
uucacuccucuccgcagucac

SEQ ID NO: 49882 - DNA, 21 bp, homo sapiens
gaggaggtggagcagatgaag

SEQ ID NO: 49883 - RNA, 21 nt, RNAi
ggagguggagcagaugaaguu

SEQ ID NO: 49884 - RNA, 21 nt, RNAi
uuccuccaccucgucuacuuc

SEQ ID NO: 49885 - DNA, 21 bp, homo sapiens
gaggtggagcagatgaagagc

SEQ ID NO: 49886 - RNA, 21 nt, RNAi
gguggagcagaugaagagcuu

SEQ ID NO: 49887 - RNA, 21 nt, RNAi
uuccaccucgucuacuucucg

SEQ ID NO: 49888 - DNA, 21 bp, homo sapiens
gagcagatgaagagctgcctc

SEQ ID NO: 49889 - RNA, 21 nt, RNAi
gcagaugaagagcugccucuu

SEQ ID NO: 49890 - RNA, 21 nt, RNAi
uucgucuacuucucgacggag

SEQ ID NO: 49891 - DNA, 21 bp, homo sapiens
gatgaagagctgcctccgagt

SEQ ID NO: 49892 - RNA, 21 nt, RNAi
ugaagagcugccuccgaguuu

SEQ ID NO: 49893 - RNA, 21 nt, RNAi
uuacuucucgacggaggcuca

SEQ ID NO: 49894 - DNA, 21 bp, homo sapiens
gaagagctgcctccgagtgct

SEQ ID NO: 49895 - RNA, 21 nt, RNAi
agagcugccuccgagugcuuu

SEQ ID NO: 49896 - RNA, 21 nt, RNAi
uuucucgacggaggcucacga

SEQ ID NO: 49897 - DNA, 21 bp, homo sapiens
gacctgtgtgagaacatggac

SEQ ID NO: 49898 - RNA, 21 nt, RNAi
ccugugugagaacauggacuu

SEQ ID NO: 49899 - RNA, 21 nt, RNAi
uuggacacacucuuguaccug

SEQ ID NO: 49900 - DNA, 21 bp, homo sapiens
gagaacatggacaatgccgca

SEQ ID NO: 49901 - RNA, 21 nt, RNAi
gaacauggacaaugccgcauu

SEQ ID NO: 49902 - RNA, 21 nt, RNAi
uucuuguaccuguuacggcgu

SEQ ID NO: 49903 - DNA, 21 bp, homo sapiens
gaacatggacaatgccgcaga

SEQ ID NO: 49904 - RNA, 21 nt, RNAi
acauggacaaugccgcagauu

SEQ ID NO: 49905 - RNA, 21 nt, RNAi
uuuguaccuguuacggcgucu

SEQ ID NO: 49906 - DNA, 21 bp, homo sapiens
gacaatgccgcagacttctgc

SEQ ID NO: 49907 - RNA, 21 nt, RNAi
caaugccgcagacuucugcuu

SEQ ID NO: 49908 - RNA, 21 nt, RNAi
uuguuacggcgucugaagacg

SEQ ID NO: 49909 - DNA, 21 bp, homo sapiens
gacttctgccagctgtctggc

SEQ ID NO: 49910 - RNA, 21 nt, RNAi
cuucugccagcugucuggcuu

SEQ ID NO: 49911 - RNA, 21 nt, RNAi
uugaagacggucgacagaccg

SEQ ID NO: 49912 - DNA, 21 bp, homo sapiens
gaacgtggcagccatccagga

SEQ ID NO: 49913 - RNA, 21 nt, RNAi
acguggcagccauccaggauu

SEQ ID NO: 49914 - RNA, 21 nt, RNAi
uuugcaccgucgguagguccu

SEQ ID NO: 49915 - DNA, 21 bp, homo sapiens
gacggcttctctgtgttgatg

SEQ ID NO: 49916 - RNA, 21 nt, RNAi
cggcuucucuguguugauguu

SEQ ID NO: 49917 - RNA, 21 nt, RNAi
uugccgaagagacacaacuac

SEQ ID NO: 49918 - DNA, 21 bp, homo sapiens
gaagctcaaggtcaaatcagc

SEQ ID NO: 49919 - RNA, 21 nt, RNAi
agcucaaggucaaaucagcuu

SEQ ID NO: 49920 - RNA, 21 nt, RNAi
uuucgaguuccaguuuagucg

SEQ ID NO: 49921 - DNA, 21 bp, homo sapiens
gaggagtaccaggaggagctg

SEQ ID NO: 49922 - RNA, 21 nt, RNAi
ggaguaccaggaggagcuguu

SEQ ID NO: 49923 - RNA, 21 nt, RNAi
uuccucaugguccuccucgac

SEQ ID NO: 49924 - DNA, 21 bp, homo sapiens
gagtaccaggaggagctggag

SEQ ID NO: 49925 - RNA, 21 nt, RNAi
guaccaggaggagcuggaguu

SEQ ID NO: 49926 - RNA, 21 nt, RNAi
uucaugguccuccucgaccuc

SEQ ID NO: 49927 - DNA, 21 bp, homo sapiens
gaggagctggagttctgtgaa

SEQ ID NO: 49928 - RNA, 21 nt, RNAi
ggagcuggaguucugugaauu

SEQ ID NO: 49929 - RNA, 21 nt, RNAi
uuccucgaccucaagacacuu

SEQ ID NO: 49930 - DNA, 21 bp, homo sapiens
gacgacagcatggatcggtga

SEQ ID NO: 49931 - RNA, 21 nt, RNAi
cgacagcauggaucggugauu

SEQ ID NO: 49932 - RNA, 21 nt, RNAi
uugcugucguaccuagccacu

SEQ ID NO: 49933 - DNA, 21 bp, homo sapiens
gacagcatggatcggtgaaac

SEQ ID NO: 49934 - RNA, 21 nt, RNAi
cagcauggaucggugaaacuu

SEQ ID NO: 49935 - RNA, 21 nt, RNAi
uugucguaccuagccacuuug

SEQ ID NO: 49936 - DNA, 21 bp, homo sapiens
gatcggtgaaaccaggtggct

SEQ ID NO: 49937 - RNA, 21 nt, RNAi
ucggugaaaccagguggcuuu

SEQ ID NO: 49938 - RNA, 21 nt, RNAi
uuagccacuuugguccaccga

SEQ ID NO: 49939 - DNA, 21 bp, homo sapiens
gaaaccaggtggcttcttgcc

SEQ ID NO: 49940 - RNA, 21 nt, RNAi
aaccagguggcuucuugccuu

SEQ ID NO: 49941 - RNA, 21 nt, RNAi
uuuugguccaccgaagaacgg

SEQ ID NO: 49942 - DNA, 21 bp, homo sapiens
gagaaaggcaccagctccttg

SEQ ID NO: 49943 - RNA, 21 nt, RNAi
gaaaggcaccagcuccuuguu

SEQ ID NO: 49944 - RNA, 21 nt, RNAi
uucuuuccguggucgaggaac

SEQ ID NO: 49945 - DNA, 21 bp, homo sapiens
gaaaggcaccagctccttgga

SEQ ID NO: 49946 - RNA, 21 nt, RNAi
aaggcaccagcuccuuggauu

SEQ ID NO: 49947 - RNA, 21 nt, RNAi
uuuuccguggucgaggaaccu

SEQ ID NO: 49948 - DNA, 21 bp, homo sapiens
taagctgctgcggctgctgga

SEQ ID NO: 49949 - RNA, 21 nt, RNAi
agcugcugcggcugcuggauu

SEQ ID NO: 49950 - RNA, 21 nt, RNAi
uuucgacgacgccgacgaccu

SEQ ID NO: 49951 - DNA, 21 bp, homo sapiens
taccaggaggagctggagttc

SEQ ID NO: 49952 - RNA, 21 nt, RNAi
ccaggaggagcuggaguucuu

SEQ ID NO: 49953 - RNA, 21 nt, RNAi
uugguccuccucgaccucaag

SEQ ID NO: 49954 - DNA, 21 bp, homo sapiens
tacagacctgtttctccagcc

SEQ ID NO: 49955 - RNA, 21 nt, RNAi
cagaccuguuucuccagccuu

SEQ ID NO: 49956 - RNA, 21 nt, RNAi
uugucuggacaaagaggucgg

SEQ ID NO: 49957 - DNA, 21 bp, homo sapiens
aagctcaaggtcaaatcagca

SEQ ID NO: 49958 - RNA, 21 nt, RNAi
gcucaaggucaaaucagcauu

SEQ ID NO: 49959 - RNA, 21 nt, RNAi
uucgaguuccaguuuagucgu

SEQ ID NO: 49960 - DNA, 21 bp, homo sapiens
aaggtcaaatcagcattcctg

SEQ ID NO: 49961 - RNA, 21 nt, RNAi
ggucaaaucagcauuccuguu

SEQ ID NO: 49962 - RNA, 21 nt, RNAi
uuccaguuuagucguaaggac

SEQ ID NO: 49963 - DNA, 21 bp, homo sapiens
caaggtcaaatcagcattcct

SEQ ID NO: 49964 - RNA, 21 nt, RNAi
aggucaaaucagcauuccuuu

SEQ ID NO: 49965 - RNA, 21 nt, RNAi
uuuccaguuuagucguaagga

SEQ ID NO: 49966 - DNA, 21 bp, homo sapiens
gagaacatggacaatgccgca

SEQ ID NO: 49967 - RNA, 21 nt, RNAi
gaacauggacaaugccgcauu

SEQ ID NO: 49968 - RNA, 21 nt, RNAi
uucuuguaccuguuacggcgu

SEQ ID NO: 49969 - DNA, 21 bp, homo sapiens
gaagctcaaggtcaaatcagc

SEQ ID NO: 49970 - RNA, 21 nt, RNAi
agcucaaggucaaaucagcuu

SEQ ID NO: 49971 - RNA, 21 nt, RNAi
uuucgaguuccaguuuagucg

SEQ ID NO: 49972 - DNA, 21 bp, homo sapiens
aaaggaggctgctgtcgatta

SEQ ID NO: 49973 - RNA, 21 nt, RNAi
aggaggcugcugucgauuauu

SEQ ID NO: 49974 - RNA, 21 nt, RNAi
uuuccuccgacgacagcuaau

SEQ ID NO: 49975 - DNA, 21 bp, homo sapiens
aaggaggctgctgtcgattaa

SEQ ID NO: 49976 - RNA, 21 nt, RNAi
ggaggcugcugucgauuaauu

SEQ ID NO: 49977 - RNA, 21 nt, RNAi
uuccuccgacgacagcuaauu

SEQ ID NO: 49978 - DNA, 21 bp, homo sapiens
aaccaggcgaagctggtggtg

SEQ ID NO: 49979 - RNA, 21 nt, RNAi
ccaggcgaagcuggugguguu

SEQ ID NO: 49980 - RNA, 21 nt, RNAi
uugguccgcuucgaccaccac

SEQ ID NO: 49981 - DNA, 21 bp, homo sapiens
aaacgtgaaccagctgtggag

SEQ ID NO: 49982 - RNA, 21 nt, RNAi
acgugaaccagcuguggaguu

SEQ ID NO: 49983 - RNA, 21 nt, RNAi
uuugcacuuggucgacaccuc

SEQ ID NO: 49984 - DNA, 21 bp, homo sapiens
aacgtgaaccagctgtggaga

SEQ ID NO: 49985 - RNA, 21 nt, RNAi
cgugaaccagcuguggagauu

SEQ ID NO: 49986 - RNA, 21 nt, RNAi
uugcacuuggucgacaccucu

SEQ ID NO: 49987 - DNA, 21 bp, homo sapiens
aagtttgttacctcatttcac

SEQ ID NO: 49988 - RNA, 21 nt, RNAi
guuuguuaccucauuucacuu

SEQ ID NO: 49989 - RNA, 21 nt, RNAi
uucaaacaauggaguaaagug

SEQ ID NO: 49990 - DNA, 21 bp, homo sapiens
aatcagatatggaagatgatg

SEQ ID NO: 49991 - RNA, 21 nt, RNAi
ucagauauggaagaugauguu

SEQ ID NO: 49992 - RNA, 21 nt, RNAi
uuagucuauaccuucuacuac

SEQ ID NO: 49993 - DNA, 21 bp, homo sapiens
aagatgatgaggaagaggaag

SEQ ID NO: 49994 - RNA, 21 nt, RNAi
gaugaugaggaagaggaaguu

SEQ ID NO: 49995 - RNA, 21 nt, RNAi
uucuacuacuccuucuccuuc

SEQ ID NO: 49996 - DNA, 21 bp, homo sapiens
aagaggaagatggtggccttt

SEQ ID NO: 49997 - RNA, 21 nt, RNAi
gaggaagaugguggccuuuuu

SEQ ID NO: 49998 - RNA, 21 nt, RNAi
uucuccuucuaccaccggaaa

SEQ ID NO: 49999 - DNA, 21 bp, homo sapiens
aaagtctcatgaagcaaacag

SEQ ID NO: 50000 - RNA, 21 nt, RNAi
agucucaugaagcaaacaguu

SEQ ID NO: 50001 - RNA, 21 nt, RNAi
uuucagaguacuucguuuguc

SEQ ID NO: 50002 - DNA, 21 bp, homo sapiens
aagtctcatgaagcaaacagc

SEQ ID NO: 50003 - RNA, 21 nt, RNAi
gucucaugaagcaaacagcuu

SEQ ID NO: 50004 - RNA, 21 nt, RNAi
uucagaguacuucguuugucg

SEQ ID NO: 50005 - DNA, 21 bp, homo sapiens
aagcaaacagcaatgcagtga

SEQ ID NO: 50006 - RNA, 21 nt, RNAi
gcaaacagcaaugcagugauu

SEQ ID NO: 50007 - RNA, 21 nt, RNAi
uucguuugucguuacgucacu

SEQ ID NO: 50008 - DNA, 21 bp, homo sapiens
aaacagcaatgcagtgagatt

SEQ ID NO: 50009 - RNA, 21 nt, RNAi
acagcaaugcagugagauuuu

SEQ ID NO: 50010 - RNA, 21 nt, RNAi
uuugucguuacgucacucuaa

SEQ ID NO: 50011 - DNA, 21 bp, homo sapiens
aacagcaatgcagtgagattt

SEQ ID NO: 50012 - RNA, 21 nt, RNAi
cagcaaugcagugagauuuuu

SEQ ID NO: 50013 - RNA, 21 nt, RNAi
uugucguuacgucacucuaaa

SEQ ID NO: 50014 - DNA, 21 bp, homo sapiens
aatgcagtgagatttagagtg

SEQ ID NO: 50015 - RNA, 21 nt, RNAi
ugcagugagauuuagaguguu

SEQ ID NO: 50016 - RNA, 21 nt, RNAi
uuacgucacucuaaaucucac

SEQ ID NO: 50017 - DNA, 21 bp, homo sapiens
aaatgctcagattgatgatga

SEQ ID NO: 50018 - RNA, 21 nt, RNAi
augcucagauugaugaugauu

SEQ ID NO: 50019 - RNA, 21 nt, RNAi
uuuacgagucuaacuacuacu

SEQ ID NO: 50020 - DNA, 21 bp, homo sapiens
aatgctcagattgatgatgat

SEQ ID NO: 50021 - RNA, 21 nt, RNAi
ugcucagauugaugaugauuu

SEQ ID NO: 50022 - RNA, 21 nt, RNAi
uuacgagucuaacuacuacua

SEQ ID NO: 50023 - DNA, 21 bp, homo sapiens
aaagccatgcttattagattg

SEQ ID NO: 50024 - RNA, 21 nt, RNAi
agccaugcuuauuagauuguu

SEQ ID NO: 50025 - RNA, 21 nt, RNAi
uuucgguacgaauaaucuaac

SEQ ID NO: 50026 - DNA, 21 bp, homo sapiens
aagccatgcttattagattga

SEQ ID NO: 50027 - RNA, 21 nt, RNAi
gccaugcuuauuagauugauu

SEQ ID NO: 50028 - RNA, 21 nt, RNAi
uucgguacgaauaaucuaacu

SEQ ID NO: 50029 - DNA, 21 bp, homo sapiens
aaatgtgagaatacaggcagt

SEQ ID NO: 50030 - RNA, 21 nt, RNAi
augugagaauacaggcaguuu

SEQ ID NO: 50031 - RNA, 21 nt, RNAi
uuuacacucuuauguccguca

SEQ ID NO: 50032 - DNA, 21 bp, homo sapiens
aatgtgagaatacaggcagtt

SEQ ID NO: 50033 - RNA, 21 nt, RNAi
ugugagaauacaggcaguuuu

SEQ ID NO: 50034 - RNA, 21 nt, RNAi
uuacacucuuauguccgucaa

SEQ ID NO: 50035 - DNA, 21 bp, homo sapiens
aatacaggcagttctggcgct

SEQ ID NO: 50036 - RNA, 21 nt, RNAi
uacaggcaguucuggcgcuuu

SEQ ID NO: 50037 - RNA, 21 nt, RNAi
uuauguccgucaagaccgcga

SEQ ID NO: 50038 - DNA, 21 bp, homo sapiens
aaggatgtgaaagaggctgtc

SEQ ID NO: 50039 - RNA, 21 nt, RNAi
ggaugugaaagaggcugucuu

SEQ ID NO: 50040 - RNA, 21 nt, RNAi
uuccuacacuuucuccgacag

SEQ ID NO: 50041 - DNA, 21 bp, homo sapiens
aaagaggctgtcagaaagctg

SEQ ID NO: 50042 - RNA, 21 nt, RNAi
agaggcugucagaaagcuguu

SEQ ID NO: 50043 - RNA, 21 nt, RNAi
uuucuccgacagucuuucgac

SEQ ID NO: 50044 - DNA, 21 bp, homo sapiens
aagaggctgtcagaaagctgg

SEQ ID NO: 50045 - RNA, 21 nt, RNAi
gaggcugucagaaagcugguu

SEQ ID NO: 50046 - RNA, 21 nt, RNAi
uucuccgacagucuuucgacc

SEQ ID NO: 50047 - DNA, 21 bp, homo sapiens
aaaggttcatatgagagctat

SEQ ID NO: 50048 - RNA, 21 nt, RNAi
agguucauaugagagcuauuu

SEQ ID NO: 50049 - RNA, 21 nt, RNAi
uuuccaaguauacucucgaua

SEQ ID NO: 50050 - DNA, 21 bp, homo sapiens
aaggttcatatgagagctatg

SEQ ID NO: 50051 - RNA, 21 nt, RNAi
gguucauaugagagcuauguu

SEQ ID NO: 50052 - RNA, 21 nt, RNAi
uuccaaguauacucucgauac

SEQ ID NO: 50053 - DNA, 21 bp, homo sapiens
aatgctccttcaacaaggtct

SEQ ID NO: 50054 - RNA, 21 nt, RNAi
ugcuccuucaacaaggucuuu

SEQ ID NO: 50055 - RNA, 21 nt, RNAi
uuacgaggaaguuguuccaga

SEQ ID NO: 50056 - DNA, 21 bp, homo sapiens
aacaaggtcttaatgacagat

SEQ ID NO: 50057 - RNA, 21 nt, RNAi
caaggucuuaaugacagauuu

SEQ ID NO: 50058 - RNA, 21 nt, RNAi
uuguuccagaauuacugucua

SEQ ID NO: 50059 - DNA, 21 bp, homo sapiens
aaggtcttaatgacagatcag

SEQ ID NO: 50060 - RNA, 21 nt, RNAi
ggucuuaaugacagaucaguu

SEQ ID NO: 50061 - RNA, 21 nt, RNAi
uuccagaauuacugucuaguc

SEQ ID NO: 50062 - DNA, 21 bp, homo sapiens
aatgacagatcagatgctgtg

SEQ ID NO: 50063 - RNA, 21 nt, RNAi
ugacagaucagaugcuguguu

SEQ ID NO: 50064 - RNA, 21 nt, RNAi
uuacugucuagucuacgacac

SEQ ID NO: 50065 - DNA, 21 bp, homo sapiens
aaacaagctatgcagaagcat

SEQ ID NO: 50066 - RNA, 21 nt, RNAi
acaagcuaugcagaagcauuu

SEQ ID NO: 50067 - RNA, 21 nt, RNAi
uuuguucgauacgucuucgua

SEQ ID NO: 50068 - DNA, 21 bp, homo sapiens
aacaagctatgcagaagcatc

SEQ ID NO: 50069 - RNA, 21 nt, RNAi
caagcuaugcagaagcaucuu

SEQ ID NO: 50070 - RNA, 21 nt, RNAi
uuguucgauacgucuucguag

SEQ ID NO: 50071 - DNA, 21 bp, homo sapiens
aagctatgcagaagcatcttc

SEQ ID NO: 50072 - RNA, 21 nt, RNAi
gcuaugcagaagcaucuucuu

SEQ ID NO: 50073 - RNA, 21 nt, RNAi
uucgauacgucuucguagaag

SEQ ID NO: 50074 - DNA, 21 bp, homo sapiens
aagcatcttcttcaaggctgg

SEQ ID NO: 50075 - RNA, 21 nt, RNAi
gcaucuucuucaaggcugguu

SEQ ID NO: 50076 - RNA, 21 nt, RNAi
uucguagaagaaguuccgacc

SEQ ID NO: 50077 - DNA, 21 bp, homo sapiens
aaggaaatatcttagagttgc

SEQ ID NO: 50078 - RNA, 21 nt, RNAi
ggaaauaucuuagaguugcuu

SEQ ID NO: 50079 - RNA, 21 nt, RNAi
uuccuuuauagaaucucaacg

SEQ ID NO: 50080 - DNA, 21 bp, homo sapiens
aaatatcttagagttgctcca

SEQ ID NO: 50081 - RNA, 21 nt, RNAi
auaucuuagaguugcuccauu

SEQ ID NO: 50082 - RNA, 21 nt, RNAi
uuuauagaaucucaacgaggu

SEQ ID NO: 50083 - DNA, 21 bp, homo sapiens
aatatcttagagttgctccat

SEQ ID NO: 50084 - RNA, 21 nt, RNAi
uaucuuagaguugcuccauuu

SEQ ID NO: 50085 - RNA, 21 nt, RNAi
uuauagaaucucaacgaggua

SEQ ID NO: 50086 - DNA, 21 bp, homo sapiens
aaattcttctgaagtggcagt

SEQ ID NO: 50087 - RNA, 21 nt, RNAi
auucuucugaaguggcaguuu

SEQ ID NO: 50088 - RNA, 21 nt, RNAi
uuuaagaagacuucaccguca

SEQ ID NO: 50089 - DNA, 21 bp, homo sapiens
aattcttctgaagtggcagtc

SEQ ID NO: 50090 - RNA, 21 nt, RNAi
uucuucugaaguggcagucuu

SEQ ID NO: 50091 - RNA, 21 nt, RNAi
uuaagaagacuucaccgucag

SEQ ID NO: 50092 - DNA, 21 bp, homo sapiens
aagtggcagtctctgttctca

SEQ ID NO: 50093 - RNA, 21 nt, RNAi
guggcagucucuguucucauu

SEQ ID NO: 50094 - RNA, 21 nt, RNAi
uucaccgucagagacaagagu

SEQ ID NO: 50095 - DNA, 21 bp, homo sapiens
aataactcctctcagtgaact

SEQ ID NO: 50096 - RNA, 21 nt, RNAi
uaacuccucucagugaacuuu

SEQ ID NO: 50097 - RNA, 21 nt, RNAi
uuauugaggagagucacuuga

SEQ ID NO: 50098 - DNA, 21 bp, homo sapiens
aactcctctcagtgaactggt

SEQ ID NO: 50099 - RNA, 21 nt, RNAi
cuccucucagugaacugguuu

SEQ ID NO: 50100 - RNA, 21 nt, RNAi
uugaggagagucacuugacca

SEQ ID NO: 50101 - DNA, 21 bp, homo sapiens
aaacaatgatggcaggaaatt

SEQ ID NO: 50102 - RNA, 21 nt, RNAi
acaaugauggcaggaaauuuu

SEQ ID NO: 50103 - RNA, 21 nt, RNAi
uuuguuacuaccguccuuuaa

SEQ ID NO: 50104 - DNA, 21 bp, homo sapiens
aacaatgatggcaggaaattg

SEQ ID NO: 50105 - RNA, 21 nt, RNAi
caaugauggcaggaaauuguu

SEQ ID NO: 50106 - RNA, 21 nt, RNAi
uuguuacuaccguccuuuaac

SEQ ID NO: 50107 - DNA, 21 bp, homo sapiens
aatgatggcaggaaattgatt

SEQ ID NO: 50108 - RNA, 21 nt, RNAi
ugauggcaggaaauugauuuu

SEQ ID NO: 50109 - RNA, 21 nt, RNAi
uuacuaccguccuuuaacuaa

SEQ ID NO: 50110 - DNA, 21 bp, homo sapiens
aaattgattccagtggaaaca

SEQ ID NO: 50111 - RNA, 21 nt, RNAi
auugauuccaguggaaacauu

SEQ ID NO: 50112 - RNA, 21 nt, RNAi
uuuaacuaaggucaccuuugu

SEQ ID NO: 50113 - DNA, 21 bp, homo sapiens
aattgattccagtggaaacat

SEQ ID NO: 50114 - RNA, 21 nt, RNAi
uugauuccaguggaaacauuu

SEQ ID NO: 50115 - RNA, 21 nt, RNAi
uuaacuaaggucaccuuugua

SEQ ID NO: 50116 - DNA, 21 bp, homo sapiens
aacattaactcctgaaattgc

SEQ ID NO: 50117 - RNA, 21 nt, RNAi
cauuaacuccugaaauugcuu

SEQ ID NO: 50118 - RNA, 21 nt, RNAi
uuguaauugaggacuuuaacg

SEQ ID NO: 50119 - DNA, 21 bp, homo sapiens
aactcctgaaattgctttgta

SEQ ID NO: 50120 - RNA, 21 nt, RNAi
cuccugaaauugcuuuguauu

SEQ ID NO: 50121 - RNA, 21 nt, RNAi
uugaggacuuuaacgaaacau

SEQ ID NO: 50122 - DNA, 21 bp, homo sapiens
aaattgctttgtattggtgtg

SEQ ID NO: 50123 - RNA, 21 nt, RNAi
auugcuuuguauugguguguu

SEQ ID NO: 50124 - RNA, 21 nt, RNAi
uuuaacgaaacauaaccacac

SEQ ID NO: 50125 - DNA, 21 bp, homo sapiens
aattgctttgtattggtgtgc

SEQ ID NO: 50126 - RNA, 21 nt, RNAi
uugcuuuguauuggugugcuu

SEQ ID NO: 50127 - RNA, 21 nt, RNAi
uuaacgaaacauaaccacacg

SEQ ID NO: 50128 - DNA, 21 bp, homo sapiens
aaaggagatgaaggtgaagaa

SEQ ID NO: 50129 - RNA, 21 nt, RNAi
aggagaugaaggugaagaauu

SEQ ID NO: 50130 - RNA, 21 nt, RNAi
uuuccucuacuuccacuucuu

SEQ ID NO: 50131 - DNA, 21 bp, homo sapiens
aaggagatgaaggtgaagaat

SEQ ID NO: 50132 - RNA, 21 nt, RNAi
ggagaugaaggugaagaauuu

SEQ ID NO: 50133 - RNA, 21 nt, RNAi
uuccucuacuuccacuucuua

SEQ ID NO: 50134 - DNA, 21 bp, homo sapiens
aatgaagaacacagaggtgat

SEQ ID NO: 50135 - RNA, 21 nt, RNAi
ugaagaacacagaggugauuu

SEQ ID NO: 50136 - RNA, 21 nt, RNAi
uuacuucuugugucuccacua

SEQ ID NO: 50137 - DNA, 21 bp, homo sapiens
aagtctttggataccagtgaa

SEQ ID NO: 50138 - RNA, 21 nt, RNAi
gucuuuggauaccagugaauu

SEQ ID NO: 50139 - RNA, 21 nt, RNAi
uucagaaaccuauggucacuu

SEQ ID NO: 50140 - DNA, 21 bp, homo sapiens
aaagactactccacatcatta

SEQ ID NO: 50141 - RNA, 21 nt, RNAi
agacuacuccacaucauuauu

SEQ ID NO: 50142 - RNA, 21 nt, RNAi
uuucugaugagguguaguaau

SEQ ID NO: 50143 - DNA, 21 bp, homo sapiens
aagactactccacatcattat

SEQ ID NO: 50144 - RNA, 21 nt, RNAi
gacuacuccacaucauuauuu

SEQ ID NO: 50145 - RNA, 21 nt, RNAi
uucugaugagguguaguaaua

SEQ ID NO: 50146 - DNA, 21 bp, homo sapiens
aataacgatccagctgatgta

SEQ ID NO: 50147 - RNA, 21 nt, RNAi
uaacgauccagcugauguauu

SEQ ID NO: 50148 - RNA, 21 nt, RNAi
uuauugcuaggucgacuacau

SEQ ID NO: 50149 - DNA, 21 bp, homo sapiens
aacgatccagctgatgtaaga

SEQ ID NO: 50150 - RNA, 21 nt, RNAi
cgauccagcugauguaagauu

SEQ ID NO: 50151 - RNA, 21 nt, RNAi
uugcuaggucgacuacauucu

SEQ ID NO: 50152 - DNA, 21 bp, homo sapiens
aaagaaagaactcaagatggc

SEQ ID NO: 50153 - RNA, 21 nt, RNAi
agaaagaacucaagauggcuu

SEQ ID NO: 50154 - RNA, 21 nt, RNAi
uuucuuucuugaguucuaccg

SEQ ID NO: 50155 - DNA, 21 bp, homo sapiens
aagaaagaactcaagatggct

SEQ ID NO: 50156 - RNA, 21 nt, RNAi
gaaagaacucaagauggcuuu

SEQ ID NO: 50157 - RNA, 21 nt, RNAi
uucuuucuugaguucuaccga

SEQ ID NO: 50158 - DNA, 21 bp, homo sapiens
aaagaactcaagatggctgaa

SEQ ID NO: 50159 - RNA, 21 nt, RNAi
agaacucaagauggcugaauu

SEQ ID NO: 50160 - RNA, 21 nt, RNAi
uuucuugaguucuaccgacuu

SEQ ID NO: 50161 - DNA, 21 bp, homo sapiens
aagaactcaagatggctgaaa

SEQ ID NO: 50162 - RNA, 21 nt, RNAi
gaacucaagauggcugaaauu

SEQ ID NO: 50163 - RNA, 21 nt, RNAi
uucuugaguucuaccgacuuu

SEQ ID NO: 50164 - DNA, 21 bp, homo sapiens
aactcaagatggctgaaataa

SEQ ID NO: 50165 - RNA, 21 nt, RNAi
cucaagauggcugaaauaauu

SEQ ID NO: 50166 - RNA, 21 nt, RNAi
uugaguucuaccgacuuuauu

SEQ ID NO: 50167 - DNA, 21 bp, homo sapiens
aaagttaagcttatcgaagcc

SEQ ID NO: 50168 - RNA, 21 nt, RNAi
aguuaagcuuaucgaagccuu

SEQ ID NO: 50169 - RNA, 21 nt, RNAi
uuucaauucgaauagcuucgg

SEQ ID NO: 50170 - DNA, 21 bp, homo sapiens
aagttaagcttatcgaagcca

SEQ ID NO: 50171 - RNA, 21 nt, RNAi
guuaagcuuaucgaagccauu

SEQ ID NO: 50172 - RNA, 21 nt, RNAi
uucaauucgaauagcuucggu

SEQ ID NO: 50173 - DNA, 21 bp, homo sapiens
aagcttatcgaagccaaagaa

SEQ ID NO: 50174 - RNA, 21 nt, RNAi
gcuuaucgaagccaaagaauu

SEQ ID NO: 50175 - RNA, 21 nt, RNAi
uucgaauagcuucgguuucuu

SEQ ID NO: 50176 - DNA, 21 bp, homo sapiens
aagccaaagaagctttggaaa

SEQ ID NO: 50177 - RNA, 21 nt, RNAi
gccaaagaagcuuuggaaauu

SEQ ID NO: 50178 - RNA, 21 nt, RNAi
uucgguuucuucgaaaccuuu

SEQ ID NO: 50179 - DNA, 21 bp, homo sapiens
aaattgcattaccttacagga

SEQ ID NO: 50180 - RNA, 21 nt, RNAi
auugcauuaccuuacaggauu

SEQ ID NO: 50181 - RNA, 21 nt, RNAi
uuuaacguaauggaauguccu

SEQ ID NO: 50182 - DNA, 21 bp, homo sapiens
aattgcattaccttacaggat

SEQ ID NO: 50183 - RNA, 21 nt, RNAi
uugcauuaccuuacaggauuu

SEQ ID NO: 50184 - RNA, 21 nt, RNAi
uuaacguaauggaauguccua

SEQ ID NO: 50185 - DNA, 21 bp, homo sapiens
aaagcattagaagatgccaga

SEQ ID NO: 50186 - RNA, 21 nt, RNAi
agcauuagaagaugccagauu

SEQ ID NO: 50187 - RNA, 21 nt, RNAi
uuucguaaucuucuacggucu

SEQ ID NO: 50188 - DNA, 21 bp, homo sapiens
aagcattagaagatgccagaa

SEQ ID NO: 50189 - RNA, 21 nt, RNAi
gcauuagaagaugccagaauu

SEQ ID NO: 50190 - RNA, 21 nt, RNAi
uucguaaucuucuacggucuu

SEQ ID NO: 50191 - DNA, 21 bp, homo sapiens
aagatgccagaataaaccttt

SEQ ID NO: 50192 - RNA, 21 nt, RNAi
gaugccagaauaaaccuuuuu

SEQ ID NO: 50193 - RNA, 21 nt, RNAi
uucuacggucuuauuuggaaa

SEQ ID NO: 50194 - DNA, 21 bp, homo sapiens
aaagagacagagcaacttgaa

SEQ ID NO: 50195 - RNA, 21 nt, RNAi
agagacagagcaacuugaauu

SEQ ID NO: 50196 - RNA, 21 nt, RNAi
uuucucugucucguugaacuu

SEQ ID NO: 50197 - DNA, 21 bp, homo sapiens
aagagacagagcaacttgaaa

SEQ ID NO: 50198 - RNA, 21 nt, RNAi
gagacagagcaacuugaaauu

SEQ ID NO: 50199 - RNA, 21 nt, RNAi
uucucugucucguugaacuuu

SEQ ID NO: 50200 - DNA, 21 bp, homo sapiens
aaagaagtccacatagagaag

SEQ ID NO: 50201 - RNA, 21 nt, RNAi
agaaguccacauagagaaguu

SEQ ID NO: 50202 - RNA, 21 nt, RNAi
uuucuucagguguaucucuuc

SEQ ID NO: 50203 - DNA, 21 bp, homo sapiens
aagaagtccacatagagaaga

SEQ ID NO: 50204 - RNA, 21 nt, RNAi
gaaguccacauagagaagauu

SEQ ID NO: 50205 - RNA, 21 nt, RNAi
uucuucagguguaucucuucu

SEQ ID NO: 50206 - DNA, 21 bp, homo sapiens
aagtccacatagagaagaatg

SEQ ID NO: 50207 - RNA, 21 nt, RNAi
guccacauagagaagaauguu

SEQ ID NO: 50208 - RNA, 21 nt, RNAi
uucagguguaucucuucuuac

SEQ ID NO: 50209 - DNA, 21 bp, homo sapiens
aagaatgatgctgaaacattg

SEQ ID NO: 50210 - RNA, 21 nt, RNAi
gaaugaugcugaaacauuguu

SEQ ID NO: 50211 - RNA, 21 nt, RNAi
uucuuacuacgacuuuguaac

SEQ ID NO: 50212 - DNA, 21 bp, homo sapiens
aatgatgctgaaacattgcag

SEQ ID NO: 50213 - RNA, 21 nt, RNAi
ugaugcugaaacauugcaguu

SEQ ID NO: 50214 - RNA, 21 nt, RNAi
uuacuacgacuuuguaacguc

SEQ ID NO: 50215 - DNA, 21 bp, homo sapiens
aactgttgaagcagatgtcca

SEQ ID NO: 50216 - RNA, 21 nt, RNAi
cuguugaagcagauguccauu

SEQ ID NO: 50217 - RNA, 21 nt, RNAi
uugacaacuucgucuacaggu

SEQ ID NO: 50218 - DNA, 21 bp, homo sapiens
aagcagatgtccatttcaaca

SEQ ID NO: 50219 - RNA, 21 nt, RNAi
gcagauguccauuucaacauu

SEQ ID NO: 50220 - RNA, 21 nt, RNAi
uucgucuacagguaaaguugu

SEQ ID NO: 50221 - DNA, 21 bp, homo sapiens
aacaggcttaagtgcaaccat

SEQ ID NO: 50222 - RNA, 21 nt, RNAi
caggcuuaagugcaaccauuu

SEQ ID NO: 50223 - RNA, 21 nt, RNAi
uuguccgaauucacguuggua

SEQ ID NO: 50224 - DNA, 21 bp, homo sapiens
aagtgcaaccatcaatggaat

SEQ ID NO: 50225 - RNA, 21 nt, RNAi
gugcaaccaucaauggaauuu

SEQ ID NO: 50226 - RNA, 21 nt, RNAi
uucacguugguaguuaccuua

SEQ ID NO: 50227 - DNA, 21 bp, homo sapiens
aaccatcaatggaatcatcga

SEQ ID NO: 50228 - RNA, 21 nt, RNAi
ccaucaauggaaucaucgauu

SEQ ID NO: 50229 - RNA, 21 nt, RNAi
uugguaguuaccuuaguagcu

SEQ ID NO: 50230 - DNA, 21 bp, homo sapiens
aatggaatcatcgaatctttg

SEQ ID NO: 50231 - RNA, 21 nt, RNAi
uggaaucaucgaaucuuuguu

SEQ ID NO: 50232 - RNA, 21 nt, RNAi
uuaccuuaguagcuuagaaac

SEQ ID NO: 50233 - DNA, 21 bp, homo sapiens
aatctttgattcttcctggaa

SEQ ID NO: 50234 - RNA, 21 nt, RNAi
ucuuugauucuuccuggaauu

SEQ ID NO: 50235 - RNA, 21 nt, RNAi
uuagaaacuaagaaggaccuu

SEQ ID NO: 50236 - DNA, 21 bp, homo sapiens
aagtattcatcctgttgtaag

SEQ ID NO: 50237 - RNA, 21 nt, RNAi
guauucauccuguuguaaguu

SEQ ID NO: 50238 - RNA, 21 nt, RNAi
uucauaaguaggacaacauuc

SEQ ID NO: 50239 - DNA, 21 bp, homo sapiens
aaggaaacacttcgtattact

SEQ ID NO: 50240 - RNA, 21 nt, RNAi
ggaaacacuucguauuacuuu

SEQ ID NO: 50241 - RNA, 21 nt, RNAi
uuccuuugugaagcauaauga

SEQ ID NO: 50242 - DNA, 21 bp, homo sapiens
aacacttcgtattactattgc

SEQ ID NO: 50243 - RNA, 21 nt, RNAi
cacuucguauuacuauugcuu

SEQ ID NO: 50244 - RNA, 21 nt, RNAi
uugugaagcauaaugauaacg

SEQ ID NO: 50245 - DNA, 21 bp, homo sapiens
aagtgctttaaaggcaatctt

SEQ ID NO: 50246 - RNA, 21 nt, RNAi
gugcuuuaaaggcaaucuuuu

SEQ ID NO: 50247 - RNA, 21 nt, RNAi
uucacgaaauuuccguuagaa

SEQ ID NO: 50248 - DNA, 21 bp, homo sapiens
aaaggcaatctttgaccaact

SEQ ID NO: 50249 - RNA, 21 nt, RNAi
aggcaaucuuugaccaacuuu

SEQ ID NO: 50250 - RNA, 21 nt, RNAi
uuuccguuagaaacugguuga

SEQ ID NO: 50251 - DNA, 21 bp, homo sapiens
aaggcaatctttgaccaactg

SEQ ID NO: 50252 - RNA, 21 nt, RNAi
ggcaaucuuugaccaacuguu

SEQ ID NO: 50253 - RNA, 21 nt, RNAi
uuccguuagaaacugguugac

SEQ ID NO: 50254 - DNA, 21 bp, homo sapiens
aatctttgaccaactgatgac

SEQ ID NO: 50255 - RNA, 21 nt, RNAi
ucuuugaccaacugaugacuu

SEQ ID NO: 50256 - RNA, 21 nt, RNAi
uuagaaacugguugacuacug

SEQ ID NO: 50257 - DNA, 21 bp, homo sapiens
aaacacttcattgtgaaggta

SEQ ID NO: 50258 - RNA, 21 nt, RNAi
acacuucauugugaagguauu

SEQ ID NO: 50259 - RNA, 21 nt, RNAi
uuugugaaguaacacuuccau

SEQ ID NO: 50260 - DNA, 21 bp, homo sapiens
aacacttcattgtgaaggtac

SEQ ID NO: 50261 - RNA, 21 nt, RNAi
cacuucauugugaagguacuu

SEQ ID NO: 50262 - RNA, 21 nt, RNAi
uugugaaguaacacuuccaug

SEQ ID NO: 50263 - DNA, 21 bp, homo sapiens
aaggtacagaaataaacagtg

SEQ ID NO: 50264 - RNA, 21 nt, RNAi
gguacagaaauaaacaguguu

SEQ ID NO: 50265 - RNA, 21 nt, RNAi
uuccaugucuuuauuugucac

SEQ ID NO: 50266 - DNA, 21 bp, homo sapiens
aaataaacagtgatgatgagc

SEQ ID NO: 50267 - RNA, 21 nt, RNAi
auaaacagugaugaugagcuu

SEQ ID NO: 50268 - RNA, 21 nt, RNAi
uuuauuugucacuacuacucg

SEQ ID NO: 50269 - DNA, 21 bp, homo sapiens
aataaacagtgatgatgagca

SEQ ID NO: 50270 - RNA, 21 nt, RNAi
uaaacagugaugaugagcauu

SEQ ID NO: 50271 - RNA, 21 nt, RNAi
uuauuugucacuacuacucgu

SEQ ID NO: 50272 - DNA, 21 bp, homo sapiens
aaacagtgatgatgagcaaga

SEQ ID NO: 50273 - RNA, 21 nt, RNAi
acagugaugaugagcaagauu

SEQ ID NO: 50274 - RNA, 21 nt, RNAi
uuugucacuacuacucguucu

SEQ ID NO: 50275 - DNA, 21 bp, homo sapiens
aacagtgatgatgagcaagaa

SEQ ID NO: 50276 - RNA, 21 nt, RNAi
cagugaugaugagcaagaauu

SEQ ID NO: 50277 - RNA, 21 nt, RNAi
uugucacuacuacucguucuu

SEQ ID NO: 50278 - DNA, 21 bp, homo sapiens
aaagaagttgaagagactgct

SEQ ID NO: 50279 - RNA, 21 nt, RNAi
agaaguugaagagacugcuuu

SEQ ID NO: 50280 - RNA, 21 nt, RNAi
uuucuucaacuucucugacga

SEQ ID NO: 50281 - DNA, 21 bp, homo sapiens
aagaagttgaagagactgcta

SEQ ID NO: 50282 - RNA, 21 nt, RNAi
gaaguugaagagacugcuauu

SEQ ID NO: 50283 - RNA, 21 nt, RNAi
uucuucaacuucucugacgau

SEQ ID NO: 50284 - DNA, 21 bp, homo sapiens
aagttgaagagactgctacag

SEQ ID NO: 50285 - RNA, 21 nt, RNAi
guugaagagacugcuacaguu

SEQ ID NO: 50286 - RNA, 21 nt, RNAi
uucaacuucucugacgauguc

SEQ ID NO: 50287 - DNA, 21 bp, homo sapiens
aagagactgctacagctaaga

SEQ ID NO: 50288 - RNA, 21 nt, RNAi
gagacugcuacagcuaagauu

SEQ ID NO: 50289 - RNA, 21 nt, RNAi
uucucugacgaugucgauucu

SEQ ID NO: 50290 - DNA, 21 bp, homo sapiens
aagaatgttctgaaactcctt

SEQ ID NO: 50291 - RNA, 21 nt, RNAi
gaauguucugaaacuccuuuu

SEQ ID NO: 50292 - RNA, 21 nt, RNAi
uucuuacaagacuuugaggaa

SEQ ID NO: 50293 - DNA, 21 bp, homo sapiens
aatgttctgaaactcctttct

SEQ ID NO: 50294 - RNA, 21 nt, RNAi
uguucugaaacuccuuucuuu

SEQ ID NO: 50295 - RNA, 21 nt, RNAi
uuacaagacuuugaggaaaga

SEQ ID NO: 50296 - DNA, 21 bp, homo sapiens
aactcctttctgatttcttag

SEQ ID NO: 50297 - RNA, 21 nt, RNAi
cuccuuucugauuucuuaguu

SEQ ID NO: 50298 - RNA, 21 nt, RNAi
uugaggaaagacuaaagaauc

SEQ ID NO: 50299 - DNA, 21 bp, homo sapiens
aacttaggactggagctgcag

SEQ ID NO: 50300 - RNA, 21 nt, RNAi
cuuaggacuggagcugcaguu

SEQ ID NO: 50301 - RNA, 21 nt, RNAi
uugaauccugaccucgacguc

SEQ ID NO: 50302 - DNA, 21 bp, homo sapiens
aaggactagccaagctgatgt

SEQ ID NO: 50303 - RNA, 21 nt, RNAi
ggacuagccaagcugauguuu

SEQ ID NO: 50304 - RNA, 21 nt, RNAi
uuccugaucgguucgacuaca

SEQ ID NO: 50305 - DNA, 21 bp, homo sapiens
aatcctgtgactgaagaggat

SEQ ID NO: 50306 - RNA, 21 nt, RNAi
uccugugacugaagaggauuu

SEQ ID NO: 50307 - RNA, 21 nt, RNAi
uuaggacacugacuucuccua

SEQ ID NO: 50308 - DNA, 21 bp, homo sapiens
aagaggatgttcaacttcgac

SEQ ID NO: 50309 - RNA, 21 nt, RNAi
gaggauguucaacuucgacuu

SEQ ID NO: 50310 - RNA, 21 nt, RNAi
uucuccuacaaguugaagcug

SEQ ID NO: 50311 - DNA, 21 bp, homo sapiens
aacttcgacattgcctaggcg

SEQ ID NO: 50312 - RNA, 21 nt, RNAi
cuucgacauugccuaggcguu

SEQ ID NO: 50313 - RNA, 21 nt, RNAi
uugaagcuguaacggauccgc

SEQ ID NO: 50314 - DNA, 21 bp, homo sapiens
aagcaggactaatcaggaatg

SEQ ID NO: 50315 - RNA, 21 nt, RNAi
gcaggacuaaucaggaauguu

SEQ ID NO: 50316 - RNA, 21 nt, RNAi
uucguccugauuaguccuuac

SEQ ID NO: 50317 - DNA, 21 bp, homo sapiens
aatcaggaatgctttgaagaa

SEQ ID NO: 50318 - RNA, 21 nt, RNAi
ucaggaaugcuuugaagaauu

SEQ ID NO: 50319 - RNA, 21 nt, RNAi
uuaguccuuacgaaacuucuu

SEQ ID NO: 50320 - DNA, 21 bp, homo sapiens
aaatgttgctgagttacttgt

SEQ ID NO: 50321 - RNA, 21 nt, RNAi
auguugcugaguuacuuguuu

SEQ ID NO: 50322 - RNA, 21 nt, RNAi
uuuacaacgacucaaugaaca

SEQ ID NO: 50323 - DNA, 21 bp, homo sapiens
aatgttgctgagttacttgta

SEQ ID NO: 50324 - RNA, 21 nt, RNAi
uguugcugaguuacuuguauu

SEQ ID NO: 50325 - RNA, 21 nt, RNAi
uuacaacgacucaaugaacau

SEQ ID NO: 50326 - DNA, 21 bp, homo sapiens
aagaccaagtggattaaatcc

SEQ ID NO: 50327 - RNA, 21 nt, RNAi
gaccaaguggauuaaauccuu

SEQ ID NO: 50328 - RNA, 21 nt, RNAi
uucugguucaccuaauuuagg

SEQ ID NO: 50329 - DNA, 21 bp, homo sapiens
aagtggattaaatcctcaggc

SEQ ID NO: 50330 - RNA, 21 nt, RNAi
guggauuaaauccucaggcuu

SEQ ID NO: 50331 - RNA, 21 nt, RNAi
uucaccuaauuuaggaguccg

SEQ ID NO: 50332 - DNA, 21 bp, homo sapiens
aaatcctcaggccaagacttc

SEQ ID NO: 50333 - RNA, 21 nt, RNAi
auccucaggccaagacuucuu

SEQ ID NO: 50334 - RNA, 21 nt, RNAi
uuuaggaguccgguucugaag

SEQ ID NO: 50335 - DNA, 21 bp, homo sapiens
aatcctcaggccaagacttcc

SEQ ID NO: 50336 - RNA, 21 nt, RNAi
uccucaggccaagacuuccuu

SEQ ID NO: 50337 - RNA, 21 nt, RNAi
uuaggaguccgguucugaagg

SEQ ID NO: 50338 - DNA, 21 bp, homo sapiens
aagattatcaggccttaacag

SEQ ID NO: 50339 - RNA, 21 nt, RNAi
gauuaucaggccuuaacaguu

SEQ ID NO: 50340 - RNA, 21 nt, RNAi
uucuaauaguccggaauuguc

SEQ ID NO: 50341 - DNA, 21 bp, homo sapiens
aacagtacatgacaatttggc

SEQ ID NO: 50342 - RNA, 21 nt, RNAi
caguacaugacaauuuggcuu

SEQ ID NO: 50343 - RNA, 21 nt, RNAi
uugucauguacuguuaaaccg

SEQ ID NO: 50344 - DNA, 21 bp, homo sapiens
aatgagatcttaacaagtccg

SEQ ID NO: 50345 - RNA, 21 nt, RNAi
ugagaucuuaacaaguccguu

SEQ ID NO: 50346 - RNA, 21 nt, RNAi
uuacucuagaauuguucaggc

SEQ ID NO: 50347 - DNA, 21 bp, homo sapiens
aacaagtccgtgctcgccaga

SEQ ID NO: 50348 - RNA, 21 nt, RNAi
caaguccgugcucgccagauu

SEQ ID NO: 50349 - RNA, 21 nt, RNAi
uuguucaggcacgagcggucu

SEQ ID NO: 50350 - DNA, 21 bp, homo sapiens
aagtccgtgctcgccagaaat

SEQ ID NO: 50351 - RNA, 21 nt, RNAi
guccgugcucgccagaaauuu

SEQ ID NO: 50352 - RNA, 21 nt, RNAi
uucaggcacgagcggucuuua

SEQ ID NO: 50353 - DNA, 21 bp, homo sapiens
aaagccttgagttctttagaa

SEQ ID NO: 50354 - RNA, 21 nt, RNAi
agccuugaguucuuuagaauu

SEQ ID NO: 50355 - RNA, 21 nt, RNAi
uuucggaacucaagaaaucuu

SEQ ID NO: 50356 - DNA, 21 bp, homo sapiens
aagccttgagttctttagaac

SEQ ID NO: 50357 - RNA, 21 nt, RNAi
gccuugaguucuuuagaacuu

SEQ ID NO: 50358 - RNA, 21 nt, RNAi
uucggaacucaagaaaucuug

SEQ ID NO: 50359 - DNA, 21 bp, homo sapiens
aactcagtagccatcttgcaa

SEQ ID NO: 50360 - RNA, 21 nt, RNAi
cucaguagccaucuugcaauu

SEQ ID NO: 50361 - RNA, 21 nt, RNAi
uugagucaucgguagaacguu

SEQ ID NO: 50362 - DNA, 21 bp, homo sapiens
aaagatcttctggttctattg

SEQ ID NO: 50363 - RNA, 21 nt, RNAi
agaucuucugguucuauuguu

SEQ ID NO: 50364 - RNA, 21 nt, RNAi
uuucuagaagaccaagauaac

SEQ ID NO: 50365 - DNA, 21 bp, homo sapiens
aagatcttctggttctattga

SEQ ID NO: 50366 - RNA, 21 nt, RNAi
gaucuucugguucuauugauu

SEQ ID NO: 50367 - RNA, 21 nt, RNAi
uucuagaagaccaagauaacu

SEQ ID NO: 50368 - DNA, 21 bp, homo sapiens
aatgagattctggagcaagta

SEQ ID NO: 50369 - RNA, 21 nt, RNAi
ugagauucuggagcaaguauu

SEQ ID NO: 50370 - RNA, 21 nt, RNAi
uuacucuaagaccucguucau

SEQ ID NO: 50371 - DNA, 21 bp, homo sapiens
aaagataggacatgtctgaga

SEQ ID NO: 50372 - RNA, 21 nt, RNAi
agauaggacaugucugagauu

SEQ ID NO: 50373 - RNA, 21 nt, RNAi
uuucuauccuguacagacucu

SEQ ID NO: 50374 - DNA, 21 bp, homo sapiens
aagataggacatgtctgagag

SEQ ID NO: 50375 - RNA, 21 nt, RNAi
gauaggacaugucugagaguu

SEQ ID NO: 50376 - RNA, 21 nt, RNAi
uucuauccuguacagacucuc

SEQ ID NO: 50377 - DNA, 21 bp, homo sapiens
aaagaatttggtgaccaagct

SEQ ID NO: 50378 - RNA, 21 nt, RNAi
agaauuuggugaccaagcuuu

SEQ ID NO: 50379 - RNA, 21 nt, RNAi
uuucuuaaaccacugguucga

SEQ ID NO: 50380 - DNA, 21 bp, homo sapiens
aagaatttggtgaccaagctg

SEQ ID NO: 50381 - RNA, 21 nt, RNAi
gaauuuggugaccaagcuguu

SEQ ID NO: 50382 - RNA, 21 nt, RNAi
uucuuaaaccacugguucgac

SEQ ID NO: 50383 - DNA, 21 bp, homo sapiens
aatttggtgaccaagctgaag

SEQ ID NO: 50384 - RNA, 21 nt, RNAi
uuuggugaccaagcugaaguu

SEQ ID NO: 50385 - RNA, 21 nt, RNAi
uuaaaccacugguucgacuuc

SEQ ID NO: 50386 - DNA, 21 bp, homo sapiens
aagctgaagcagcacaggatg

SEQ ID NO: 50387 - RNA, 21 nt, RNAi
gcugaagcagcacaggauguu

SEQ ID NO: 50388 - RNA, 21 nt, RNAi
uucgacuucgucguguccuac

SEQ ID NO: 50389 - DNA, 21 bp, homo sapiens
aagcagcacaggatgccacct

SEQ ID NO: 50390 - RNA, 21 nt, RNAi
gcagcacaggaugccaccuuu

SEQ ID NO: 50391 - RNA, 21 nt, RNAi
uucgucguguccuacggugga

SEQ ID NO: 50392 - DNA, 21 bp, homo sapiens
aagaagtatatatgactccac

SEQ ID NO: 50393 - RNA, 21 nt, RNAi
gaaguauauaugacuccacuu

SEQ ID NO: 50394 - RNA, 21 nt, RNAi
uucuucauauauacugaggug

SEQ ID NO: 50395 - DNA, 21 bp, homo sapiens
aagtatatatgactccactca

SEQ ID NO: 50396 - RNA, 21 nt, RNAi
guauauaugacuccacucauu

SEQ ID NO: 50397 - RNA, 21 nt, RNAi
uucauauauacugaggugagu

SEQ ID NO: 50398 - DNA, 21 bp, homo sapiens
aagcatcaaagtctactcagc

SEQ ID NO: 50399 - RNA, 21 nt, RNAi
gcaucaaagucuacucagcuu

SEQ ID NO: 50400 - RNA, 21 nt, RNAi
uucguaguuucagaugagucg

SEQ ID NO: 50401 - DNA, 21 bp, homo sapiens
aaagtctactcagctaaagac

SEQ ID NO: 50402 - RNA, 21 nt, RNAi
agucuacucagcuaaagacuu

SEQ ID NO: 50403 - RNA, 21 nt, RNAi
uuucagaugagucgauuucug

SEQ ID NO: 50404 - DNA, 21 bp, homo sapiens
aagtctactcagctaaagact

SEQ ID NO: 50405 - RNA, 21 nt, RNAi
gucuacucagcuaaagacuuu

SEQ ID NO: 50406 - RNA, 21 nt, RNAi
uucagaugagucgauuucuga

SEQ ID NO: 50407 - DNA, 21 bp, homo sapiens
aaagactaacagaggacagag

SEQ ID NO: 50408 - RNA, 21 nt, RNAi
agacuaacagaggacagaguu

SEQ ID NO: 50409 - RNA, 21 nt, RNAi
uuucugauugucuccugucuc

SEQ ID NO: 50410 - DNA, 21 bp, homo sapiens
aagactaacagaggacagaga

SEQ ID NO: 50411 - RNA, 21 nt, RNAi
gacuaacagaggacagagauu

SEQ ID NO: 50412 - RNA, 21 nt, RNAi
uucugauugucuccugucucu

SEQ ID NO: 50413 - DNA, 21 bp, homo sapiens
aaagtgacagtttcagctagg

SEQ ID NO: 50414 - RNA, 21 nt, RNAi
agugacaguuucagcuagguu

SEQ ID NO: 50415 - RNA, 21 nt, RNAi
uuucacugucaaagucgaucc

SEQ ID NO: 50416 - DNA, 21 bp, homo sapiens
aagtgacagtttcagctagga

SEQ ID NO: 50417 - RNA, 21 nt, RNAi
gugacaguuucagcuaggauu

SEQ ID NO: 50418 - RNA, 21 nt, RNAi
uucacugucaaagucgauccu

SEQ ID NO: 50419 - DNA, 21 bp, homo sapiens
aacaggaggtgtcagactgct

SEQ ID NO: 50420 - RNA, 21 nt, RNAi
caggaggugucagacugcuuu

SEQ ID NO: 50421 - RNA, 21 nt, RNAi
uuguccuccacagucugacga

SEQ ID NO: 50422 - DNA, 21 bp, homo sapiens
aagccgactctgaaagtgatc

SEQ ID NO: 50423 - RNA, 21 nt, RNAi
gccgacucugaaagugaucuu

SEQ ID NO: 50424 - RNA, 21 nt, RNAi
uucggcugagacuuucacuag

SEQ ID NO: 50425 - DNA, 21 bp, homo sapiens
aaagtgatcatgaagttccag

SEQ ID NO: 50426 - RNA, 21 nt, RNAi
agugaucaugaaguuccaguu

SEQ ID NO: 50427 - RNA, 21 nt, RNAi
uuucacuaguacuucaagguc

SEQ ID NO: 50428 - DNA, 21 bp, homo sapiens
aagtgatcatgaagttccaga

SEQ ID NO: 50429 - RNA, 21 nt, RNAi
gugaucaugaaguuccagauu

SEQ ID NO: 50430 - RNA, 21 nt, RNAi
uucacuaguacuucaaggucu

SEQ ID NO: 50431 - DNA, 21 bp, homo sapiens
aagttccagaaccagaatcag

SEQ ID NO: 50432 - RNA, 21 nt, RNAi
guuccagaaccagaaucaguu

SEQ ID NO: 50433 - RNA, 21 nt, RNAi
uucaaggucuuggucuuaguc

SEQ ID NO: 50434 - DNA, 21 bp, homo sapiens
aaccagaatcagaaatgaaga

SEQ ID NO: 50435 - RNA, 21 nt, RNAi
ccagaaucagaaaugaagauu

SEQ ID NO: 50436 - RNA, 21 nt, RNAi
uuggucuuagucuuuacuucu

SEQ ID NO: 50437 - DNA, 21 bp, homo sapiens
aatcagaaatgaagatgagac

SEQ ID NO: 50438 - RNA, 21 nt, RNAi
ucagaaaugaagaugagacuu

SEQ ID NO: 50439 - RNA, 21 nt, RNAi
uuagucuuuacuucuacucug

SEQ ID NO: 50440 - DNA, 21 bp, homo sapiens
  misc_feature (17)..(17): n is a, c, g, or t
aaatgaagatgagactnccaa

SEQ ID NO: 50441 - RNA, 21 nt, RNAi
  misc_feature (15)..(15): n is a, c, g, or u
augaagaugagacunccaauu

SEQ ID NO: 50442 - RNA, 20 nt, RNAi
uuuacuucuacucugagguu

SEQ ID NO: 50443 - DNA, 21 bp, homo sapiens
  misc_feature (16)..(16): n is a, c, g, or t
aatgaagatgagactnccaag

SEQ ID NO: 50444 - RNA, 21 nt, RNAi
  misc_feature (14)..(14): n is a, c, g, or u
ugaagaugagacunccaaguu

SEQ ID NO: 50445 - RNA, 20 nt, RNAi
uuacuucuacucugagguuc

SEQ ID NO: 50446 - DNA, 21 bp, homo sapiens
  misc_feature (12)..(12): n is a, c, g, or t
aagatgagactnccaagacga

SEQ ID NO: 50447 - RNA, 21 nt, RNAi
  misc_feature (10)..(10): n is a, c, g, or u
gaugagacunccaagacgauu

SEQ ID NO: 50448 - RNA, 20 nt, RNAi
uucuacucugagguucugcu

SEQ ID NO: 50449 - DNA, 21 bp, homo sapiens
  misc_feature (12)..(12): n is a, c, g, or t
aagttaggaaanacgatggag

SEQ ID NO: 50450 - RNA, 21 nt, RNAi
  misc_feature (10)..(10): n is a, c, g, or u
guuaggaaanacgauggaguu

SEQ ID NO: 50451 - RNA, 20 nt, RNAi
uucaauccuuuugcuaccuc

SEQ ID NO: 50452 - DNA, 21 bp, homo sapiens
  misc_feature (4)..(4): n is a, c, g, or t
  misc_feature (15)..(15): n is a, c, g, or t
aaanacgatggaggnggaatc

SEQ ID NO: 50453 - RNA, 21 nt, RNAi
  misc_feature (2)..(2): n is a, c, g, or u
  misc_feature (13)..(13): n is a, c, g, or u
anacgauggaggnggaaucuu

SEQ ID NO: 50454 - RNA, 19 nt, RNAi
uuuugcuaccuccccuuag

SEQ ID NO: 50455 - DNA, 21 bp, homo sapiens
  misc_feature (3)..(3): n is a, c, g, or t
  misc_feature (14)..(14): n is a, c, g, or t
aanacgatggaggnggaatcc

SEQ ID NO: 50456 - RNA, 21 nt, RNAi
  misc_feature (1)..(1): n is a, c, g, or u
  misc_feature (12)..(12): n is a, c, g, or u
nacgauggaggnggaauccuu

SEQ ID NO: 50457 - RNA, 19 nt, RNAi
uuugcuaccuccccuuagg

SEQ ID NO: 50458 - DNA, 21 bp, homo sapiens
caccagaaccaggcgaagctg

SEQ ID NO: 50459 - RNA, 21 nt, RNAi
ccagaaccaggcgaagcuguu

SEQ ID NO: 50460 - RNA, 21 nt, RNAi
uuggucuugguccgcuucgac

SEQ ID NO: 50461 - DNA, 21 bp, homo sapiens
cagaaccaggcgaagctggtg

SEQ ID NO: 50462 - RNA, 21 nt, RNAi
gaaccaggcgaagcugguguu

SEQ ID NO: 50463 - RNA, 21 nt, RNAi
uucuugguccgcuucgaccac

SEQ ID NO: 50464 - DNA, 21 bp, homo sapiens
cacctaccgcacgatggatga

SEQ ID NO: 50465 - RNA, 21 nt, RNAi
ccuaccgcacgauggaugauu

SEQ ID NO: 50466 - RNA, 21 nt, RNAi
uuggauggcgugcuaccuacu

SEQ ID NO: 50467 - DNA, 21 bp, homo sapiens
cacgatggatgataagacagt

SEQ ID NO: 50468 - RNA, 21 nt, RNAi
cgauggaugauaagacaguuu

SEQ ID NO: 50469 - RNA, 21 nt, RNAi
uugcuaccuacuauucuguca

SEQ ID NO: 50470 - DNA, 21 bp, homo sapiens
catgaggagttcattcattac

SEQ ID NO: 50471 - RNA, 21 nt, RNAi
ugaggaguucauucauuacuu

SEQ ID NO: 50472 - RNA, 21 nt, RNAi
uuacuccucaaguaaguaaug

SEQ ID NO: 50473 - DNA, 21 bp, homo sapiens
cagcaaagtttgttacctcat

SEQ ID NO: 50474 - RNA, 21 nt, RNAi
gcaaaguuuguuaccucauuu

SEQ ID NO: 50475 - RNA, 21 nt, RNAi
uucguuucaaacaauggagua

SEQ ID NO: 50476 - DNA, 21 bp, homo sapiens
caaagtttgttacctcatttc

SEQ ID NO: 50477 - RNA, 21 nt, RNAi
aaguuuguuaccucauuucuu

SEQ ID NO: 50478 - RNA, 21 nt, RNAi
uuuucaaacaauggaguaaag

SEQ ID NO: 50479 - DNA, 21 bp, homo sapiens
catttcaccaatcagatatgg

SEQ ID NO: 50480 - RNA, 21 nt, RNAi
uuucaccaaucagauaugguu

SEQ ID NO: 50481 - RNA, 21 nt, RNAi
uuaaagugguuagucuauacc

SEQ ID NO: 50482 - DNA, 21 bp, homo sapiens
caccaatcagatatggaagat

SEQ ID NO: 50483 - RNA, 21 nt, RNAi
ccaaucagauauggaagauuu

SEQ ID NO: 50484 - RNA, 21 nt, RNAi
uugguuagucuauaccuucua

SEQ ID NO: 50485 - DNA, 21 bp, homo sapiens
caatcagatatggaagatgat

SEQ ID NO: 50486 - RNA, 21 nt, RNAi
aucagauauggaagaugauuu

SEQ ID NO: 50487 - RNA, 21 nt, RNAi
uuuagucuauaccuucuacua

SEQ ID NO: 50488 - DNA, 21 bp, homo sapiens
cagatatggaagatgatgagg

SEQ ID NO: 50489 - RNA, 21 nt, RNAi
gauauggaagaugaugagguu

SEQ ID NO: 50490 - RNA, 21 nt, RNAi
uucuauaccuucuacuacucc

SEQ ID NO: 50491 - DNA, 21 bp, homo sapiens
catgaagcaaacagcaatgca

SEQ ID NO: 50492 - RNA, 21 nt, RNAi
ugaagcaaacagcaaugcauu

SEQ ID NO: 50493 - RNA, 21 nt, RNAi
uuacuucguuugucguuacgu

SEQ ID NO: 50494 - DNA, 21 bp, homo sapiens
caaacagcaatgcagtgagat

SEQ ID NO: 50495 - RNA, 21 nt, RNAi
aacagcaaugcagugagauuu

SEQ ID NO: 50496 - RNA, 21 nt, RNAi
uuuugucguuacgucacucua

SEQ ID NO: 50497 - DNA, 21 bp, homo sapiens
cagcaatgcagtgagatttag

SEQ ID NO: 50498 - RNA, 21 nt, RNAi
gcaaugcagugagauuuaguu

SEQ ID NO: 50499 - RNA, 21 nt, RNAi
uucguuacgucacucuaaauc

SEQ ID NO: 50500 - DNA, 21 bp, homo sapiens
caatgcagtgagatttagagt

SEQ ID NO: 50501 - RNA, 21 nt, RNAi
augcagugagauuuagaguuu

SEQ ID NO: 50502 - RNA, 21 nt, RNAi
uuuacgucacucuaaaucuca

SEQ ID NO: 50503 - DNA, 21 bp, homo sapiens
cagtgagatttagagtgtgcc

SEQ ID NO: 50504 - RNA, 21 nt, RNAi
gugagauuuagagugugccuu

SEQ ID NO: 50505 - RNA, 21 nt, RNAi
uucacucuaaaucucacacgg

SEQ ID NO: 50506 - DNA, 21 bp, homo sapiens
cagattgatgatgatgtgttt

SEQ ID NO: 50507 - RNA, 21 nt, RNAi
gauugaugaugauguguuuuu

SEQ ID NO: 50508 - RNA, 21 nt, RNAi
uucuaacuacuacuacacaaa

SEQ ID NO: 50509 - DNA, 21 bp, homo sapiens
caaatgtgagaatacaggcag

SEQ ID NO: 50510 - RNA, 21 nt, RNAi
aaugugagaauacaggcaguu

SEQ ID NO: 50511 - RNA, 21 nt, RNAi
uuuuacacucuuauguccguc

SEQ ID NO: 50512 - DNA, 21 bp, homo sapiens
caggcagttctggcgctttca

SEQ ID NO: 50513 - RNA, 21 nt, RNAi
ggcaguucuggcgcuuucauu

SEQ ID NO: 50514 - RNA, 21 nt, RNAi
uuccgucaagaccgcgaaagu

SEQ ID NO: 50515 - DNA, 21 bp, homo sapiens
cagttctggcgctttcacgac

SEQ ID NO: 50516 - RNA, 21 nt, RNAi
guucuggcgcuuucacgacuu

SEQ ID NO: 50517 - RNA, 21 nt, RNAi
uucaagaccgcgaaagugcug

SEQ ID NO: 50518 - DNA, 21 bp, homo sapiens
cagtggttaatgcatatgcta

SEQ ID NO: 50519 - RNA, 21 nt, RNAi
gugguuaaugcauaugcuauu

SEQ ID NO: 50520 - RNA, 21 nt, RNAi
uucaccaauuacguauacgau

SEQ ID NO: 50521 - DNA, 21 bp, homo sapiens
cagtgttatcatgtattgcac

SEQ ID NO: 50522 - RNA, 21 nt, RNAi
guguuaucauguauugcacuu

SEQ ID NO: 50523 - RNA, 21 nt, RNAi
uucacaauaguacauaacgug

SEQ ID NO: 50524 - DNA, 21 bp, homo sapiens
catgtattgcaccatcagcaa

SEQ ID NO: 50525 - RNA, 21 nt, RNAi
uguauugcaccaucagcaauu

SEQ ID NO: 50526 - RNA, 21 nt, RNAi
uuacauaacgugguagucguu

SEQ ID NO: 50527 - DNA, 21 bp, homo sapiens
caccatcagcaaagactttgc

SEQ ID NO: 50528 - RNA, 21 nt, RNAi
ccaucagcaaagacuuugcuu

SEQ ID NO: 50529 - RNA, 21 nt, RNAi
uugguagucguuucugaaacg

SEQ ID NO: 50530 - DNA, 21 bp, homo sapiens
catcagcaaagactttgccaa

SEQ ID NO: 50531 - RNA, 21 nt, RNAi
ucagcaaagacuuugccaauu

SEQ ID NO: 50532 - RNA, 21 nt, RNAi
uuagucguuucugaaacgguu

SEQ ID NO: 50533 - DNA, 21 bp, homo sapiens
caccaaggatgtgaaagaggc

SEQ ID NO: 50534 - RNA, 21 nt, RNAi
ccaaggaugugaaagaggcuu

SEQ ID NO: 50535 - RNA, 21 nt, RNAi
uugguuccuacacuuucuccg

SEQ ID NO: 50536 - DNA, 21 bp, homo sapiens
caaggatgtgaaagaggctgt

SEQ ID NO: 50537 - RNA, 21 nt, RNAi
aggaugugaaagaggcuguuu

SEQ ID NO: 50538 - RNA, 21 nt, RNAi
uuuccuacacuuucuccgaca

SEQ ID NO: 50539 - DNA, 21 bp, homo sapiens
cagaaagctggcttatcaggt

SEQ ID NO: 50540 - RNA, 21 nt, RNAi
gaaagcuggcuuaucagguuu

SEQ ID NO: 50541 - RNA, 21 nt, RNAi
uucuuucgaccgaauagucca

SEQ ID NO: 50542 - DNA, 21 bp, homo sapiens
catatgagagctatgtccatt

SEQ ID NO: 50543 - RNA, 21 nt, RNAi
uaugagagcuauguccauuuu

SEQ ID NO: 50544 - RNA, 21 nt, RNAi
uuauacucucgauacagguaa

SEQ ID NO: 50545 - DNA, 21 bp, homo sapiens
cattgctcagagagtaatgct

SEQ ID NO: 50546 - RNA, 21 nt, RNAi
uugcucagagaguaaugcuuu

SEQ ID NO: 50547 - RNA, 21 nt, RNAi
uuaacgagucucucauuacga

SEQ ID NO: 50548 - DNA, 21 bp, homo sapiens
cagagagtaatgctccttcaa

SEQ ID NO: 50549 - RNA, 21 nt, RNAi
gagaguaaugcuccuucaauu

SEQ ID NO: 50550 - RNA, 21 nt, RNAi
uucucucauuacgaggaaguu

SEQ ID NO: 50551 - DNA, 21 bp, homo sapiens
caacaaggtcttaatgacaga

SEQ ID NO: 50552 - RNA, 21 nt, RNAi
acaaggucuuaaugacagauu

SEQ ID NO: 50553 - RNA, 21 nt, RNAi
uuuguuccagaauuacugucu

SEQ ID NO: 50554 - DNA, 21 bp, homo sapiens
caaggtcttaatgacagatca

SEQ ID NO: 50555 - RNA, 21 nt, RNAi
aggucuuaaugacagaucauu

SEQ ID NO: 50556 - RNA, 21 nt, RNAi
uuuccagaauuacugucuagu

SEQ ID NO: 50557 - DNA, 21 bp, homo sapiens
cagatcagatgctgtgaaaca

SEQ ID NO: 50558 - RNA, 21 nt, RNAi
gaucagaugcugugaaacauu

SEQ ID NO: 50559 - RNA, 21 nt, RNAi
uucuagucuacgacacuuugu

SEQ ID NO: 50560 - DNA, 21 bp, homo sapiens
cagatgctgtgaaacaagcta

SEQ ID NO: 50561 - RNA, 21 nt, RNAi
gaugcugugaaacaagcuauu

SEQ ID NO: 50562 - RNA, 21 nt, RNAi
uucuacgacacuuuguucgau

SEQ ID NO: 50563 - DNA, 21 bp, homo sapiens
caagctatgcagaagcatctt

SEQ ID NO: 50564 - RNA, 21 nt, RNAi
agcuaugcagaagcaucuuuu

SEQ ID NO: 50565 - RNA, 21 nt, RNAi
uuucgauacgucuucguagaa

SEQ ID NO: 50566 - DNA, 21 bp, homo sapiens
cagaagcatcttcttcaaggc

SEQ ID NO: 50567 - RNA, 21 nt, RNAi
gaagcaucuucuucaaggcuu

SEQ ID NO: 50568 - RNA, 21 nt, RNAi
uucuucguagaagaaguuccg

SEQ ID NO: 50569 - DNA, 21 bp, homo sapiens
catcttcttcaaggctggtta

SEQ ID NO: 50570 - RNA, 21 nt, RNAi
ucuucuucaaggcugguuauu

SEQ ID NO: 50571 - RNA, 21 nt, RNAi
uuagaagaaguuccgaccaau

SEQ ID NO: 50572 - DNA, 21 bp, homo sapiens
cagtctctgttctcaatgcct

SEQ ID NO: 50573 - RNA, 21 nt, RNAi
gucucuguucucaaugccuuu

SEQ ID NO: 50574 - RNA, 21 nt, RNAi
uucagagacaagaguuacgga

SEQ ID NO: 50575 - DNA, 21 bp, homo sapiens
caataactcctctcagtgaac

SEQ ID NO: 50576 - RNA, 21 nt, RNAi
auaacuccucucagugaacuu

SEQ ID NO: 50577 - RNA, 21 nt, RNAi
uuuauugaggagagucacuug

SEQ ID NO: 50578 - DNA, 21 bp, homo sapiens
caatgatggcaggaaattgat

SEQ ID NO: 50579 - RNA, 21 nt, RNAi
augauggcaggaaauugauuu

SEQ ID NO: 50580 - RNA, 21 nt, RNAi
uuuacuaccguccuuuaacua

SEQ ID NO: 50581 - DNA, 21 bp, homo sapiens
caggaaattgattccagtgga

SEQ ID NO: 50582 - RNA, 21 nt, RNAi
ggaaauugauuccaguggauu

SEQ ID NO: 50583 - RNA, 21 nt, RNAi
uuccuuuaacuaaggucaccu

SEQ ID NO: 50584 - DNA, 21 bp, homo sapiens
cagtggaaacattaactcctg

SEQ ID NO: 50585 - RNA, 21 nt, RNAi
guggaaacauuaacuccuguu

SEQ ID NO: 50586 - RNA, 21 nt, RNAi
uucaccuuuguaauugaggac

SEQ ID NO: 50587 - DNA, 21 bp, homo sapiens
cattaactcctgaaattgctt

SEQ ID NO: 50588 - RNA, 21 nt, RNAi
uuaacuccugaaauugcuuuu

SEQ ID NO: 50589 - RNA, 21 nt, RNAi
uuaauugaggacuuuaacgaa

SEQ ID NO: 50590 - DNA, 21 bp, homo sapiens
cagagcctgtagtatatgcag

SEQ ID NO: 50591 - RNA, 21 nt, RNAi
gagccuguaguauaugcaguu

SEQ ID NO: 50592 - RNA, 21 nt, RNAi
uucucggacaucauauacguc

SEQ ID NO: 50593 - DNA, 21 bp, homo sapiens
catccagagcattccagttgt

SEQ ID NO: 50594 - RNA, 21 nt, RNAi
uccagagcauuccaguuguuu

SEQ ID NO: 50595 - RNA, 21 nt, RNAi
uuaggucucguaaggucaaca

SEQ ID NO: 50596 - DNA, 21 bp, homo sapiens
cagagcattccagttgttaat

SEQ ID NO: 50597 - RNA, 21 nt, RNAi
gagcauuccaguuguuaauuu

SEQ ID NO: 50598 - RNA, 21 nt, RNAi
uucucguaaggucaacaauua

SEQ ID NO: 50599 - DNA, 21 bp, homo sapiens
cattccagttgttaatgaaga

SEQ ID NO: 50600 - RNA, 21 nt, RNAi
uuccaguuguuaaugaagauu

SEQ ID NO: 50601 - RNA, 21 nt, RNAi
uuaaggucaacaauuacuucu

SEQ ID NO: 50602 - DNA, 21 bp, homo sapiens
cagttgttaatgaagaacaca

SEQ ID NO: 50603 - RNA, 21 nt, RNAi
guuguuaaugaagaacacauu

SEQ ID NO: 50604 - RNA, 21 nt, RNAi
uucaacaauuacuucuugugu

SEQ ID NO: 50605 - DNA, 21 bp, homo sapiens
cataggtcaacaattgattct

SEQ ID NO: 50606 - RNA, 21 nt, RNAi
uaggucaacaauugauucuuu

SEQ ID NO: 50607 - RNA, 21 nt, RNAi
uuauccaguuguuaacuaaga

SEQ ID NO: 50608 - DNA, 21 bp, homo sapiens
cagtgaagaaggaggaagaaa

SEQ ID NO: 50609 - RNA, 21 nt, RNAi
gugaagaaggaggaagaaauu

SEQ ID NO: 50610 - RNA, 21 nt, RNAi
uucacuucuuccuccuucuuu

SEQ ID NO: 50611 - DNA, 21 bp, homo sapiens
cagaaattatctcagagattc

SEQ ID NO: 50612 - RNA, 21 nt, RNAi
gaaauuaucucagagauucuu

SEQ ID NO: 50613 - RNA, 21 nt, RNAi
uucuuuaauagagucucuaag

SEQ ID NO: 50614 - DNA, 21 bp, homo sapiens
cattgttactgttggtgttaa

SEQ ID NO: 50615 - RNA, 21 nt, RNAi
uuguuacuguugguguuaauu

SEQ ID NO: 50616 - RNA, 21 nt, RNAi
uuaacaaugacaaccacaauu

SEQ ID NO: 50617 - DNA, 21 bp, homo sapiens
cagctgatgtaagaaagaaag

SEQ ID NO: 50618 - RNA, 21 nt, RNAi
gcugauguaagaaagaaaguu

SEQ ID NO: 50619 - RNA, 21 nt, RNAi
uucgacuacauucuuucuuuc

SEQ ID NO: 50620 - DNA, 21 bp, homo sapiens
cattagaagatgccagaataa

SEQ ID NO: 50621 - RNA, 21 nt, RNAi
uuagaagaugccagaauaauu

SEQ ID NO: 50622 - RNA, 21 nt, RNAi
uuaaucuucuacggucuuauu

SEQ ID NO: 50623 - DNA, 21 bp, homo sapiens
cagagcaacttgaaattaaag

SEQ ID NO: 50624 - RNA, 21 nt, RNAi
gagcaacuugaaauuaaaguu

SEQ ID NO: 50625 - RNA, 21 nt, RNAi
uucucguugaacuuuaauuuc

SEQ ID NO: 50626 - DNA, 21 bp, homo sapiens
cacatagagaagaatgatgct

SEQ ID NO: 50627 - RNA, 21 nt, RNAi
cauagagaagaaugaugcuuu

SEQ ID NO: 50628 - RNA, 21 nt, RNAi
uuguaucucuucuuacuacga

SEQ ID NO: 50629 - DNA, 21 bp, homo sapiens
catagagaagaatgatgctga

SEQ ID NO: 50630 - RNA, 21 nt, RNAi
uagagaagaaugaugcugauu

SEQ ID NO: 50631 - RNA, 21 nt, RNAi
uuaucucuucuuacuacgacu

SEQ ID NO: 50632 - DNA, 21 bp, homo sapiens
cagatgtccatttcaacaggc

SEQ ID NO: 50633 - RNA, 21 nt, RNAi
gauguccauuucaacaggcuu

SEQ ID NO: 50634 - RNA, 21 nt, RNAi
uucuacagguaaaguuguccg

SEQ ID NO: 50635 - DNA, 21 bp, homo sapiens
catttcaacaggcttaagtgc

SEQ ID NO: 50636 - RNA, 21 nt, RNAi
uuucaacaggcuuaagugcuu

SEQ ID NO: 50637 - RNA, 21 nt, RNAi
uuaaaguuguccgaauucacg

SEQ ID NO: 50638 - DNA, 21 bp, homo sapiens
caacaggcttaagtgcaacca

SEQ ID NO: 50639 - RNA, 21 nt, RNAi
acaggcuuaagugcaaccauu

SEQ ID NO: 50640 - RNA, 21 nt, RNAi
uuuguccgaauucacguuggu

SEQ ID NO: 50641 - DNA, 21 bp, homo sapiens
caggcttaagtgcaaccatca

SEQ ID NO: 50642 - RNA, 21 nt, RNAi
ggcuuaagugcaaccaucauu

SEQ ID NO: 50643 - RNA, 21 nt, RNAi
uuccgaauucacguugguagu

SEQ ID NO: 50644 - DNA, 21 bp, homo sapiens
caaccatcaatggaatcatcg

SEQ ID NO: 50645 - RNA, 21 nt, RNAi
accaucaauggaaucaucguu

SEQ ID NO: 50646 - RNA, 21 nt, RNAi
uuugguaguuaccuuaguagc

SEQ ID NO: 50647 - DNA, 21 bp, homo sapiens
catcaatggaatcatcgaatc

SEQ ID NO: 50648 - RNA, 21 nt, RNAi
ucaauggaaucaucgaaucuu

SEQ ID NO: 50649 - RNA, 21 nt, RNAi
uuaguuaccuuaguagcuuag

SEQ ID NO: 50650 - DNA, 21 bp, homo sapiens
caatggaatcatcgaatcttt

SEQ ID NO: 50651 - RNA, 21 nt, RNAi
auggaaucaucgaaucuuuuu

SEQ ID NO: 50652 - RNA, 21 nt, RNAi
uuuaccuuaguagcuuagaaa

SEQ ID NO: 50653 - DNA, 21 bp, homo sapiens
catcgaatctttgattcttcc

SEQ ID NO: 50654 - RNA, 21 nt, RNAi
ucgaaucuuugauucuuccuu

SEQ ID NO: 50655 - RNA, 21 nt, RNAi
uuagcuuagaaacuaagaagg

SEQ ID NO: 50656 - DNA, 21 bp, homo sapiens
catcctgttgtaagaaacctg

SEQ ID NO: 50657 - RNA, 21 nt, RNAi
uccuguuguaagaaaccuguu

SEQ ID NO: 50658 - RNA, 21 nt, RNAi
uuaggacaacauucuuuggac

SEQ ID NO: 50659 - DNA, 21 bp, homo sapiens
caaggaaacacttcgtattac

SEQ ID NO: 50660 - RNA, 21 nt, RNAi
aggaaacacuucguauuacuu

SEQ ID NO: 50661 - RNA, 21 nt, RNAi
uuuccuuugugaagcauaaug

SEQ ID NO: 50662 - DNA, 21 bp, homo sapiens
cacttcgtattactattgcag

SEQ ID NO: 50663 - RNA, 21 nt, RNAi
cuucguauuacuauugcaguu

SEQ ID NO: 50664 - RNA, 21 nt, RNAi
uugaagcauaaugauaacguc

SEQ ID NO: 50665 - DNA, 21 bp, homo sapiens
caatctttgaccaactgatga

SEQ ID NO: 50666 - RNA, 21 nt, RNAi
aucuuugaccaacugaugauu

SEQ ID NO: 50667 - RNA, 21 nt, RNAi
uuuagaaacugguugacuacu

SEQ ID NO: 50668 - DNA, 21 bp, homo sapiens
cacttcattgtgaaggtacag

SEQ ID NO: 50669 - RNA, 21 nt, RNAi
cuucauugugaagguacaguu

SEQ ID NO: 50670 - RNA, 21 nt, RNAi
uugaaguaacacuuccauguc

SEQ ID NO: 50671 - DNA, 21 bp, homo sapiens
cattgtgaaggtacagaaata

SEQ ID NO: 50672 - RNA, 21 nt, RNAi
uugugaagguacagaaauauu

SEQ ID NO: 50673 - RNA, 21 nt, RNAi
uuaacacuuccaugucuuuau

SEQ ID NO: 50674 - DNA, 21 bp, homo sapiens
cagaaataaacagtgatgatg

SEQ ID NO: 50675 - RNA, 21 nt, RNAi
gaaauaaacagugaugauguu

SEQ ID NO: 50676 - RNA, 21 nt, RNAi
uucuuuauuugucacuacuac

SEQ ID NO: 50677 - DNA, 21 bp, homo sapiens
cagtgatgatgagcaagaatc

SEQ ID NO: 50678 - RNA, 21 nt, RNAi
gugaugaugagcaagaaucuu

SEQ ID NO: 50679 - RNA, 21 nt, RNAi
uucacuacuacucguucuuag

SEQ ID NO: 50680 - DNA, 21 bp, homo sapiens
cagctaagaatgttctgaaac

SEQ ID NO: 50681 - RNA, 21 nt, RNAi
gcuaagaauguucugaaacuu

SEQ ID NO: 50682 - RNA, 21 nt, RNAi
uucgauucuuacaagacuuug

SEQ ID NO: 50683 - DNA, 21 bp, homo sapiens
cagaaggactagccaagctga

SEQ ID NO: 50684 - RNA, 21 nt, RNAi
gaaggacuagccaagcugauu

SEQ ID NO: 50685 - RNA, 21 nt, RNAi
uucuuccugaucgguucgacu

SEQ ID NO: 50686 - DNA, 21 bp, homo sapiens
cagcagcaggattctttctcg

SEQ ID NO: 50687 - RNA, 21 nt, RNAi
gcagcaggauucuuucucguu

SEQ ID NO: 50688 - RNA, 21 nt, RNAi
uucgucguccuaagaaagagc

SEQ ID NO: 50689 - DNA, 21 bp, homo sapiens
cagcaggattctttctcgtct

SEQ ID NO: 50690 - RNA, 21 nt, RNAi
gcaggauucuuucucgucuuu

SEQ ID NO: 50691 - RNA, 21 nt, RNAi
uucguccuaagaaagagcaga

SEQ ID NO: 50692 - DNA, 21 bp, homo sapiens
caggattctttctcgtcttat

SEQ ID NO: 50693 - RNA, 21 nt, RNAi
ggauucuuucucgucuuauuu

SEQ ID NO: 50694 - RNA, 21 nt, RNAi
uuccuaagaaagagcagaaua

SEQ ID NO: 50695 - DNA, 21 bp, homo sapiens
caatcctgtgactgaagagga

SEQ ID NO: 50696 - RNA, 21 nt, RNAi
auccugugacugaagaggauu

SEQ ID NO: 50697 - RNA, 21 nt, RNAi
uuuaggacacugacuucuccu

SEQ ID NO: 50698 - DNA, 21 bp, homo sapiens
caacttcgacattgcctaggc

SEQ ID NO: 50699 - RNA, 21 nt, RNAi
acuucgacauugccuaggcuu

SEQ ID NO: 50700 - RNA, 21 nt, RNAi
uuugaagcuguaacggauccg

SEQ ID NO: 50701 - DNA, 21 bp, homo sapiens
cattgcctaggcgtgttcttc

SEQ ID NO: 50702 - RNA, 21 nt, RNAi
uugccuaggcguguucuucuu

SEQ ID NO: 50703 - RNA, 21 nt, RNAi
uuaacggauccgcacaagaag

SEQ ID NO: 50704 - DNA, 21 bp, homo sapiens
caagcaggactaatcaggaat

SEQ ID NO: 50705 - RNA, 21 nt, RNAi
agcaggacuaaucaggaauuu

SEQ ID NO: 50706 - RNA, 21 nt, RNAi
uuucguccugauuaguccuua

SEQ ID NO: 50707 - DNA, 21 bp, homo sapiens
caggactaatcaggaatgctt

SEQ ID NO: 50708 - RNA, 21 nt, RNAi
ggacuaaucaggaaugcuuuu

SEQ ID NO: 50709 - RNA, 21 nt, RNAi
uuccugauuaguccuuacgaa

SEQ ID NO: 50710 - DNA, 21 bp, homo sapiens
caggaatgctttgaagaagct

SEQ ID NO: 50711 - RNA, 21 nt, RNAi
ggaaugcuuugaagaagcuuu

SEQ ID NO: 50712 - RNA, 21 nt, RNAi
uuccuuacgaaacuucuucga

SEQ ID NO: 50713 - DNA, 21 bp, homo sapiens
catcttctcctttagctgaaa

SEQ ID NO: 50714 - RNA, 21 nt, RNAi
ucuucuccuuuagcugaaauu

SEQ ID NO: 50715 - RNA, 21 nt, RNAi
uuagaagaggaaaucgacuuu

SEQ ID NO: 50716 - DNA, 21 bp, homo sapiens
cacaaatgttgctgagttact

SEQ ID NO: 50717 - RNA, 21 nt, RNAi
caaauguugcugaguuacuuu

SEQ ID NO: 50718 - RNA, 21 nt, RNAi
uuguuuacaacgacucaauga

SEQ ID NO: 50719 - DNA, 21 bp, homo sapiens
caaatgttgctgagttacttg

SEQ ID NO: 50720 - RNA, 21 nt, RNAi
aauguugcugaguuacuuguu

SEQ ID NO: 50721 - RNA, 21 nt, RNAi
uuuuacaacgacucaaugaac

SEQ ID NO: 50722 - DNA, 21 bp, homo sapiens
caagaccaagtggattaaatc

SEQ ID NO: 50723 - RNA, 21 nt, RNAi
agaccaaguggauuaaaucuu

SEQ ID NO: 50724 - RNA, 21 nt, RNAi
uuucugguucaccuaauuuag

SEQ ID NO: 50725 - DNA, 21 bp, homo sapiens
caagtggattaaatcctcagg

SEQ ID NO: 50726 - RNA, 21 nt, RNAi
aguggauuaaauccucagguu

SEQ ID NO: 50727 - RNA, 21 nt, RNAi
uuucaccuaauuuaggagucc

SEQ ID NO: 50728 - DNA, 21 bp, homo sapiens
caagattatcaggccttaaca

SEQ ID NO: 50729 - RNA, 21 nt, RNAi
agauuaucaggccuuaacauu

SEQ ID NO: 50730 - RNA, 21 nt, RNAi
uuucuaauaguccggaauugu

SEQ ID NO: 50731 - DNA, 21 bp, homo sapiens
caggccttaacagtacatgac

SEQ ID NO: 50732 - RNA, 21 nt, RNAi
ggccuuaacaguacaugacuu

SEQ ID NO: 50733 - RNA, 21 nt, RNAi
uuccggaauugucauguacug

SEQ ID NO: 50734 - DNA, 21 bp, homo sapiens
cagtacatgacaatttggcta

SEQ ID NO: 50735 - RNA, 21 nt, RNAi
guacaugacaauuuggcuauu

SEQ ID NO: 50736 - RNA, 21 nt, RNAi
uucauguacuguuaaaccgau

SEQ ID NO: 50737 - DNA, 21 bp, homo sapiens
catgacaatttggctatgaaa

SEQ ID NO: 50738 - RNA, 21 nt, RNAi
ugacaauuuggcuaugaaauu

SEQ ID NO: 50739 - RNA, 21 nt, RNAi
uuacuguuaaaccgauacuuu

SEQ ID NO: 50740 - DNA, 21 bp, homo sapiens
caatgagatcttaacaagtcc

SEQ ID NO: 50741 - RNA, 21 nt, RNAi
augagaucuuaacaaguccuu

SEQ ID NO: 50742 - RNA, 21 nt, RNAi
uuuacucuagaauuguucagg

SEQ ID NO: 50743 - DNA, 21 bp, homo sapiens
caagtccgtgctcgccagaaa

SEQ ID NO: 50744 - RNA, 21 nt, RNAi
aguccgugcucgccagaaauu

SEQ ID NO: 50745 - RNA, 21 nt, RNAi
uuucaggcacgagcggucuuu

SEQ ID NO: 50746 - DNA, 21 bp, homo sapiens
cagaaattcgagtctatacaa

SEQ ID NO: 50747 - RNA, 21 nt, RNAi
gaaauucgagucuauacaauu

SEQ ID NO: 50748 - RNA, 21 nt, RNAi
uucuuuaagcucagauauguu

SEQ ID NO: 50749 - DNA, 21 bp, homo sapiens
catgtctgagagctttggaga

SEQ ID NO: 50750 - RNA, 21 nt, RNAi
ugucugagagcuuuggagauu

SEQ ID NO: 50751 - RNA, 21 nt, RNAi
uuacagacucucgaaaccucu

SEQ ID NO: 50752 - DNA, 21 bp, homo sapiens
caagctgaagcagcacaggat

SEQ ID NO: 50753 - RNA, 21 nt, RNAi
agcugaagcagcacaggauuu

SEQ ID NO: 50754 - RNA, 21 nt, RNAi
uuucgacuucgucguguccua

SEQ ID NO: 50755 - DNA, 21 bp, homo sapiens
cagcacaggatgccaccttga

SEQ ID NO: 50756 - RNA, 21 nt, RNAi
gcacaggaugccaccuugauu

SEQ ID NO: 50757 - RNA, 21 nt, RNAi
uucguguccuacgguggaacu

SEQ ID NO: 50758 - DNA, 21 bp, homo sapiens
cacaggatgccaccttgacta

SEQ ID NO: 50759 - RNA, 21 nt, RNAi
caggaugccaccuugacuauu

SEQ ID NO: 50760 - RNA, 21 nt, RNAi
uuguccuacgguggaacugau

SEQ ID NO: 50761 - DNA, 21 bp, homo sapiens
caggatgccaccttgactaca

SEQ ID NO: 50762 - RNA, 21 nt, RNAi
ggaugccaccuugacuacauu

SEQ ID NO: 50763 - RNA, 21 nt, RNAi
uuccuacgguggaacugaugu

SEQ ID NO: 50764 - DNA, 21 bp, homo sapiens
caccttgactacaactacttt

SEQ ID NO: 50765 - RNA, 21 nt, RNAi
ccuugacuacaacuacuuuuu

SEQ ID NO: 50766 - RNA, 21 nt, RNAi
uuggaacugauguugaugaaa

SEQ ID NO: 50767 - DNA, 21 bp, homo sapiens
caagcatcaaagtctactcag

SEQ ID NO: 50768 - RNA, 21 nt, RNAi
agcaucaaagucuacucaguu

SEQ ID NO: 50769 - RNA, 21 nt, RNAi
uuucguaguuucagaugaguc

SEQ ID NO: 50770 - DNA, 21 bp, homo sapiens
catcaaagtctactcagctaa

SEQ ID NO: 50771 - RNA, 21 nt, RNAi
ucaaagucuacucagcuaauu

SEQ ID NO: 50772 - RNA, 21 nt, RNAi
uuaguuucagaugagucgauu

SEQ ID NO: 50773 - DNA, 21 bp, homo sapiens
caaagtctactcagctaaaga

SEQ ID NO: 50774 - RNA, 21 nt, RNAi
aagucuacucagcuaaagauu

SEQ ID NO: 50775 - RNA, 21 nt, RNAi
uuuucagaugagucgauuucu

SEQ ID NO: 50776 - DNA, 21 bp, homo sapiens
cagctaaagactaacagagga

SEQ ID NO: 50777 - RNA, 21 nt, RNAi
gcuaaagacuaacagaggauu

SEQ ID NO: 50778 - RNA, 21 nt, RNAi
uucgauuucugauugucuccu

SEQ ID NO: 50779 - DNA, 21 bp, homo sapiens
cagtttcagctaggacgaaca

SEQ ID NO: 50780 - RNA, 21 nt, RNAi
guuucagcuaggacgaacauu

SEQ ID NO: 50781 - RNA, 21 nt, RNAi
uucaaagucgauccugcuugu

SEQ ID NO: 50782 - DNA, 21 bp, homo sapiens
cagctaggacgaacaggaggt

SEQ ID NO: 50783 - RNA, 21 nt, RNAi
gcuaggacgaacaggagguuu

SEQ ID NO: 50784 - RNA, 21 nt, RNAi
uucgauccugcuuguccucca

SEQ ID NO: 50785 - DNA, 21 bp, homo sapiens
caggaggtgtcagactgctga

SEQ ID NO: 50786 - RNA, 21 nt, RNAi
ggaggugucagacugcugauu

SEQ ID NO: 50787 - RNA, 21 nt, RNAi
uuccuccacagucugacgacu

SEQ ID NO: 50788 - DNA, 21 bp, homo sapiens
cagactgctgaagccgactct

SEQ ID NO: 50789 - RNA, 21 nt, RNAi
gacugcugaagccgacucuuu

SEQ ID NO: 50790 - RNA, 21 nt, RNAi
uucugacgacuucggcugaga

SEQ ID NO: 50791 - DNA, 21 bp, homo sapiens
catgaagttccagaaccagaa

SEQ ID NO: 50792 - RNA, 21 nt, RNAi
ugaaguuccagaaccagaauu

SEQ ID NO: 50793 - RNA, 21 nt, RNAi
uuacuucaaggucuuggucuu

SEQ ID NO: 50794 - DNA, 21 bp, homo sapiens
cagaaccagaatcagaaatga

SEQ ID NO: 50795 - RNA, 21 nt, RNAi
gaaccagaaucagaaaugauu

SEQ ID NO: 50796 - RNA, 21 nt, RNAi
uucuuggucuuagucuuuacu

SEQ ID NO: 50797 - DNA, 21 bp, homo sapiens
cagaatcagaaatgaagatga

SEQ ID NO: 50798 - RNA, 21 nt, RNAi
gaaucagaaaugaagaugauu

SEQ ID NO: 50799 - RNA, 21 nt, RNAi
uucuuagucuuuacuucuacu

SEQ ID NO: 50800 - DNA, 21 bp, homo sapiens
  misc_feature (20)..(20): n is a, c, g, or t
cagaaatgaagatgagactnc

SEQ ID NO: 50801 - RNA, 21 nt, RNAi
  misc_feature (18)..(18): n is a, c, g, or u
gaaaugaagaugagacuncuu

SEQ ID NO: 50802 - RNA, 20 nt, RNAi
uucuuuacuucuacucugag

SEQ ID NO: 50803 - DNA, 21 bp, homo sapiens
gagcggaaaggaggctgctgt

SEQ ID NO: 50804 - RNA, 21 nt, RNAi
gcggaaaggaggcugcuguuu

SEQ ID NO: 50805 - RNA, 21 nt, RNAi
uucgccuuuccuccgacgaca

SEQ ID NO: 50806 - DNA, 21 bp, homo sapiens
gaaaggaggctgctgtcgatt

SEQ ID NO: 50807 - RNA, 21 nt, RNAi
aaggaggcugcugucgauuuu

SEQ ID NO: 50808 - RNA, 21 nt, RNAi
uuuuccuccgacgacagcuaa

SEQ ID NO: 50809 - DNA, 21 bp, homo sapiens
gaggctgctgtcgattaagga

SEQ ID NO: 50810 - RNA, 21 nt, RNAi
ggcugcugucgauuaaggauu

SEQ ID NO: 50811 - RNA, 21 nt, RNAi
uuccgacgacagcuaauuccu

SEQ ID NO: 50812 - DNA, 21 bp, homo sapiens
gattaaggaggcctttcggct

SEQ ID NO: 50813 - RNA, 21 nt, RNAi
uuaaggaggccuuucggcuuu

SEQ ID NO: 50814 - RNA, 21 nt, RNAi
uuaauuccuccggaaagccga

SEQ ID NO: 50815 - DNA, 21 bp, homo sapiens
gaaccaggcgaagctggtggt

SEQ ID NO: 50816 - RNA, 21 nt, RNAi
accaggcgaagcuggugguuu

SEQ ID NO: 50817 - RNA, 21 nt, RNAi
uuugguccgcuucgaccacca

SEQ ID NO: 50818 - DNA, 21 bp, homo sapiens
gaggagttcattcattacctt

SEQ ID NO: 50819 - RNA, 21 nt, RNAi
ggaguucauucauuaccuuuu

SEQ ID NO: 50820 - RNA, 21 nt, RNAi
uuccucaaguaaguaauggaa

SEQ ID NO: 50821 - DNA, 21 bp, homo sapiens
gaatttgcagcaaagtttgtt

SEQ ID NO: 50822 - RNA, 21 nt, RNAi
auuugcagcaaaguuuguuuu

SEQ ID NO: 50823 - RNA, 21 nt, RNAi
uuuaaacgucguuucaaacaa

SEQ ID NO: 50824 - DNA, 21 bp, homo sapiens
gatatggaagatgatgaggaa

SEQ ID NO: 50825 - RNA, 21 nt, RNAi
uauggaagaugaugaggaauu

SEQ ID NO: 50826 - RNA, 21 nt, RNAi
uuauaccuucuacuacuccuu

SEQ ID NO: 50827 - DNA, 21 bp, homo sapiens
gaagatgatgaggaagaggaa

SEQ ID NO: 50828 - RNA, 21 nt, RNAi
agaugaugaggaagaggaauu

SEQ ID NO: 50829 - RNA, 21 nt, RNAi
uuucuacuacuccuucuccuu

SEQ ID NO: 50830 - DNA, 21 bp, homo sapiens
gatgatgaggaagaggaagat

SEQ ID NO: 50831 - RNA, 21 nt, RNAi
ugaugaggaagaggaagauuu

SEQ ID NO: 50832 - RNA, 21 nt, RNAi
uuacuacuccuucuccuucua

SEQ ID NO: 50833 - DNA, 21 bp, homo sapiens
gatgaggaagaggaagatggt

SEQ ID NO: 50834 - RNA, 21 nt, RNAi
ugaggaagaggaagaugguuu

SEQ ID NO: 50835 - RNA, 21 nt, RNAi
uuacuccuucuccuucuacca

SEQ ID NO: 50836 - DNA, 21 bp, homo sapiens
gaggaagaggaagatggtggc

SEQ ID NO: 50837 - RNA, 21 nt, RNAi
ggaagaggaagaugguggcuu

SEQ ID NO: 50838 - RNA, 21 nt, RNAi
uuccuucuccuucuaccaccg

SEQ ID NO: 50839 - DNA, 21 bp, homo sapiens
gaagaggaagatggtggcctt

SEQ ID NO: 50840 - RNA, 21 nt, RNAi
agaggaagaugguggccuuuu

SEQ ID NO: 50841 - RNA, 21 nt, RNAi
uuucuccuucuaccaccggaa

SEQ ID NO: 50842 - DNA, 21 bp, homo sapiens
gaagcaaacagcaatgcagtg

SEQ ID NO: 50843 - RNA, 21 nt, RNAi
agcaaacagcaaugcaguguu

SEQ ID NO: 50844 - RNA, 21 nt, RNAi
uuucguuugucguuacgucac

SEQ ID NO: 50845 - DNA, 21 bp, homo sapiens
gagatttagagtgtgcctgct

SEQ ID NO: 50846 - RNA, 21 nt, RNAi
gauuuagagugugccugcuuu

SEQ ID NO: 50847 - RNA, 21 nt, RNAi
uucuaaaucucacacggacga

SEQ ID NO: 50848 - DNA, 21 bp, homo sapiens
gatttagagtgtgcctgctca

SEQ ID NO: 50849 - RNA, 21 nt, RNAi
uuuagagugugccugcucauu

SEQ ID NO: 50850 - RNA, 21 nt, RNAi
uuaaaucucacacggacgagu

SEQ ID NO: 50851 - DNA, 21 bp, homo sapiens
gagtgtgcctgctcataaaca

SEQ ID NO: 50852 - RNA, 21 nt, RNAi
gugugccugcucauaaacauu

SEQ ID NO: 50853 - RNA, 21 nt, RNAi
uucacacggacgaguauuugu

SEQ ID NO: 50854 - DNA, 21 bp, homo sapiens
gattgatgatgatgtgtttga

SEQ ID NO: 50855 - RNA, 21 nt, RNAi
uugaugaugauguguuugauu

SEQ ID NO: 50856 - RNA, 21 nt, RNAi
uuaacuacuacuacacaaacu

SEQ ID NO: 50857 - DNA, 21 bp, homo sapiens
gataagattccaaatgtgaga

SEQ ID NO: 50858 - RNA, 21 nt, RNAi
uaagauuccaaaugugagauu

SEQ ID NO: 50859 - RNA, 21 nt, RNAi
uuauucuaagguuuacacucu

SEQ ID NO: 50860 - DNA, 21 bp, homo sapiens
gattccaaatgtgagaataca

SEQ ID NO: 50861 - RNA, 21 nt, RNAi
uuccaaaugugagaauacauu

SEQ ID NO: 50862 - RNA, 21 nt, RNAi
uuaagguuuacacucuuaugu

SEQ ID NO: 50863 - DNA, 21 bp, homo sapiens
gagaatacaggcagttctggc

SEQ ID NO: 50864 - RNA, 21 nt, RNAi
gaauacaggcaguucuggcuu

SEQ ID NO: 50865 - RNA, 21 nt, RNAi
uucuuauguccgucaagaccg

SEQ ID NO: 50866 - DNA, 21 bp, homo sapiens
gaatacaggcagttctggcgc

SEQ ID NO: 50867 - RNA, 21 nt, RNAi
auacaggcaguucuggcgcuu

SEQ ID NO: 50868 - RNA, 21 nt, RNAi
uuuauguccgucaagaccgcg

SEQ ID NO: 50869 - DNA, 21 bp, homo sapiens
gattcaaatccagaagttaga

SEQ ID NO: 50870 - RNA, 21 nt, RNAi
uucaaauccagaaguuagauu

SEQ ID NO: 50871 - RNA, 21 nt, RNAi
uuaaguuuaggucuucaaucu

SEQ ID NO: 50872 - DNA, 21 bp, homo sapiens
gatgtgaaagaggctgtcaga

SEQ ID NO: 50873 - RNA, 21 nt, RNAi
ugugaaagaggcugucagauu

SEQ ID NO: 50874 - RNA, 21 nt, RNAi
uuacacuuucuccgacagucu

SEQ ID NO: 50875 - DNA, 21 bp, homo sapiens
gaaagaggctgtcagaaagct

SEQ ID NO: 50876 - RNA, 21 nt, RNAi
aagaggcugucagaaagcuuu

SEQ ID NO: 50877 - RNA, 21 nt, RNAi
uuuucuccgacagucuuucga

SEQ ID NO: 50878 - DNA, 21 bp, homo sapiens
gaggctgtcagaaagctggct

SEQ ID NO: 50879 - RNA, 21 nt, RNAi
ggcugucagaaagcuggcuuu

SEQ ID NO: 50880 - RNA, 21 nt, RNAi
uuccgacagucuuucgaccga

SEQ ID NO: 50881 - DNA, 21 bp, homo sapiens
gaaagctggcttatcaggttt

SEQ ID NO: 50882 - RNA, 21 nt, RNAi
aagcuggcuuaucagguuuuu

SEQ ID NO: 50883 - RNA, 21 nt, RNAi
uuuucgaccgaauaguccaaa

SEQ ID NO: 50884 - DNA, 21 bp, homo sapiens
gagagctatgtccattgctca

SEQ ID NO: 50885 - RNA, 21 nt, RNAi
gagcuauguccauugcucauu

SEQ ID NO: 50886 - RNA, 21 nt, RNAi
uucucgauacagguaacgagu

SEQ ID NO: 50887 - DNA, 21 bp, homo sapiens
gagctatgtccattgctcaga

SEQ ID NO: 50888 - RNA, 21 nt, RNAi
gcuauguccauugcucagauu

SEQ ID NO: 50889 - RNA, 21 nt, RNAi
uucgauacagguaacgagucu

SEQ ID NO: 50890 - DNA, 21 bp, homo sapiens
gagagtaatgctccttcaaca

SEQ ID NO: 50891 - RNA, 21 nt, RNAi
gaguaaugcuccuucaacauu

SEQ ID NO: 50892 - RNA, 21 nt, RNAi
uucucauuacgaggaaguugu

SEQ ID NO: 50893 - DNA, 21 bp, homo sapiens
gagtaatgctccttcaacaag

SEQ ID NO: 50894 - RNA, 21 nt, RNAi
guaaugcuccuucaacaaguu

SEQ ID NO: 50895 - RNA, 21 nt, RNAi
uucauuacgaggaaguuguuc

SEQ ID NO: 50896 - DNA, 21 bp, homo sapiens
gacagatcagatgctgtgaaa

SEQ ID NO: 50897 - RNA, 21 nt, RNAi
cagaucagaugcugugaaauu

SEQ ID NO: 50898 - RNA, 21 nt, RNAi
uugucuagucuacgacacuuu

SEQ ID NO: 50899 - DNA, 21 bp, homo sapiens
gatcagatgctgtgaaacaag

SEQ ID NO: 50900 - RNA, 21 nt, RNAi
ucagaugcugugaaacaaguu

SEQ ID NO: 50901 - RNA, 21 nt, RNAi
uuagucuacgacacuuuguuc

SEQ ID NO: 50902 - DNA, 21 bp, homo sapiens
gatgctgtgaaacaagctatg

SEQ ID NO: 50903 - RNA, 21 nt, RNAi
ugcugugaaacaagcuauguu

SEQ ID NO: 50904 - RNA, 21 nt, RNAi
uuacgacacuuuguucgauac

SEQ ID NO: 50905 - DNA, 21 bp, homo sapiens
gaaacaagctatgcagaagca

SEQ ID NO: 50906 - RNA, 21 nt, RNAi
aacaagcuaugcagaagcauu

SEQ ID NO: 50907 - RNA, 21 nt, RNAi
uuuuguucgauacgucuucgu

SEQ ID NO: 50908 - DNA, 21 bp, homo sapiens
gaagcatcttcttcaaggctg

SEQ ID NO: 50909 - RNA, 21 nt, RNAi
agcaucuucuucaaggcuguu

SEQ ID NO: 50910 - RNA, 21 nt, RNAi
uuucguagaagaaguuccgac

SEQ ID NO: 50911 - DNA, 21 bp, homo sapiens
gaaggaaatatcttagagttg

SEQ ID NO: 50912 - RNA, 21 nt, RNAi
aggaaauaucuuagaguuguu

SEQ ID NO: 50913 - RNA, 21 nt, RNAi
uuuccuuuauagaaucucaac

SEQ ID NO: 50914 - DNA, 21 bp, homo sapiens
gaaatatcttagagttgctcc

SEQ ID NO: 50915 - RNA, 21 nt, RNAi
aauaucuuagaguugcuccuu

SEQ ID NO: 50916 - RNA, 21 nt, RNAi
uuuuauagaaucucaacgagg

SEQ ID NO: 50917 - DNA, 21 bp, homo sapiens
gagttgctccatcggttggat

SEQ ID NO: 50918 - RNA, 21 nt, RNAi
guugcuccaucgguuggauuu

SEQ ID NO: 50919 - RNA, 21 nt, RNAi
uucaacgagguagccaaccua

SEQ ID NO: 50920 - DNA, 21 bp, homo sapiens
gaagtggcagtctctgttctc

SEQ ID NO: 50921 - RNA, 21 nt, RNAi
aguggcagucucuguucucuu

SEQ ID NO: 50922 - RNA, 21 nt, RNAi
uuucaccgucagagacaagag

SEQ ID NO: 50923 - DNA, 21 bp, homo sapiens
gatggcaggaaattgattcca

SEQ ID NO: 50924 - RNA, 21 nt, RNAi
uggcaggaaauugauuccauu

SEQ ID NO: 50925 - RNA, 21 nt, RNAi
uuaccguccuuuaacuaaggu

SEQ ID NO: 50926 - DNA, 21 bp, homo sapiens
gaaattgattccagtggaaac

SEQ ID NO: 50927 - RNA, 21 nt, RNAi
aauugauuccaguggaaacuu

SEQ ID NO: 50928 - RNA, 21 nt, RNAi
uuuuaacuaaggucaccuuug

SEQ ID NO: 50929 - DNA, 21 bp, homo sapiens
gattccagtggaaacattaac

SEQ ID NO: 50930 - RNA, 21 nt, RNAi
uuccaguggaaacauuaacuu

SEQ ID NO: 50931 - RNA, 21 nt, RNAi
uuaaggucaccuuuguaauug

SEQ ID NO: 50932 - DNA, 21 bp, homo sapiens
gaaattgctttgtattggtgt

SEQ ID NO: 50933 - RNA, 21 nt, RNAi
aauugcuuuguauugguguuu

SEQ ID NO: 50934 - RNA, 21 nt, RNAi
uuuuaacgaaacauaaccaca

SEQ ID NO: 50935 - DNA, 21 bp, homo sapiens
gagcctgtagtatatgcagac

SEQ ID NO: 50936 - RNA, 21 nt, RNAi
gccuguaguauaugcagacuu

SEQ ID NO: 50937 - RNA, 21 nt, RNAi
uucggacaucauauacgucug

SEQ ID NO: 50938 - DNA, 21 bp, homo sapiens
gagttacatccagagcattcc

SEQ ID NO: 50939 - RNA, 21 nt, RNAi
guuacauccagagcauuccuu

SEQ ID NO: 50940 - RNA, 21 nt, RNAi
uucaauguaggucucguaagg

SEQ ID NO: 50941 - DNA, 21 bp, homo sapiens
gagcattccagttgttaatga

SEQ ID NO: 50942 - RNA, 21 nt, RNAi
gcauuccaguuguuaaugauu

SEQ ID NO: 50943 - RNA, 21 nt, RNAi
uucguaaggucaacaauuacu

SEQ ID NO: 50944 - DNA, 21 bp, homo sapiens
gaattcataggtcaacaattg

SEQ ID NO: 50945 - RNA, 21 nt, RNAi
auucauaggucaacaauuguu

SEQ ID NO: 50946 - RNA, 21 nt, RNAi
uuuaaguauccaguuguuaac

SEQ ID NO: 50947 - DNA, 21 bp, homo sapiens
gataccagtgaagaaggagga

SEQ ID NO: 50948 - RNA, 21 nt, RNAi
uaccagugaagaaggaggauu

SEQ ID NO: 50949 - RNA, 21 nt, RNAi
uuauggucacuucuuccuccu

SEQ ID NO: 50950 - DNA, 21 bp, homo sapiens
gaaagactactccacatcatt

SEQ ID NO: 50951 - RNA, 21 nt, RNAi
aagacuacuccacaucauuuu

SEQ ID NO: 50952 - RNA, 21 nt, RNAi
uuuucugaugagguguaguaa

SEQ ID NO: 50953 - DNA, 21 bp, homo sapiens
gactactccacatcattatag

SEQ ID NO: 50954 - RNA, 21 nt, RNAi
cuacuccacaucauuauaguu

SEQ ID NO: 50955 - RNA, 21 nt, RNAi
uugaugagguguaguaauauc

SEQ ID NO: 50956 - DNA, 21 bp, homo sapiens
gagaacacaaattgttacaga

SEQ ID NO: 50957 - RNA, 21 nt, RNAi
gaacacaaauuguuacagauu

SEQ ID NO: 50958 - RNA, 21 nt, RNAi
uucuuguguuuaacaaugucu

SEQ ID NO: 50959 - DNA, 21 bp, homo sapiens
gaaattatctcagagattcgg

SEQ ID NO: 50960 - RNA, 21 nt, RNAi
aauuaucucagagauucgguu

SEQ ID NO: 50961 - RNA, 21 nt, RNAi
uuuuaauagagucucuaagcc

SEQ ID NO: 50962 - DNA, 21 bp, homo sapiens
gatccagctgatgtaagaaag

SEQ ID NO: 50963 - RNA, 21 nt, RNAi
uccagcugauguaagaaaguu

SEQ ID NO: 50964 - RNA, 21 nt, RNAi
uuaggucgacuacauucuuuc

SEQ ID NO: 50965 - DNA, 21 bp, homo sapiens
gatgtaagaaagaaagaactc

SEQ ID NO: 50966 - RNA, 21 nt, RNAi
uguaagaaagaaagaacucuu

SEQ ID NO: 50967 - RNA, 21 nt, RNAi
uuacauucuuucuuucuugag

SEQ ID NO: 50968 - DNA, 21 bp, homo sapiens
gaaagaaagaactcaagatgg

SEQ ID NO: 50969 - RNA, 21 nt, RNAi
aagaaagaacucaagaugguu

SEQ ID NO: 50970 - RNA, 21 nt, RNAi
uuuucuuucuugaguucuacc

SEQ ID NO: 50971 - DNA, 21 bp, homo sapiens
gaaagaactcaagatggctga

SEQ ID NO: 50972 - RNA, 21 nt, RNAi
aagaacucaagauggcugauu

SEQ ID NO: 50973 - RNA, 21 nt, RNAi
uuuucuugaguucuaccgacu

SEQ ID NO: 50974 - DNA, 21 bp, homo sapiens
gaactcaagatggctgaaata

SEQ ID NO: 50975 - RNA, 21 nt, RNAi
acucaagauggcugaaauauu

SEQ ID NO: 50976 - RNA, 21 nt, RNAi
uuugaguucuaccgacuuuau

SEQ ID NO: 50977 - DNA, 21 bp, homo sapiens
gaagccaaagaagctttggaa

SEQ ID NO: 50978 - RNA, 21 nt, RNAi
agccaaagaagcuuuggaauu

SEQ ID NO: 50979 - RNA, 21 nt, RNAi
uuucgguuucuucgaaaccuu

SEQ ID NO: 50980 - DNA, 21 bp, homo sapiens
gaagatgccagaataaacctt

SEQ ID NO: 50981 - RNA, 21 nt, RNAi
agaugccagaauaaaccuuuu

SEQ ID NO: 50982 - RNA, 21 nt, RNAi
uuucuacggucuuauuuggaa

SEQ ID NO: 50983 - DNA, 21 bp, homo sapiens
gaaagagacagagcaacttga

SEQ ID NO: 50984 - RNA, 21 nt, RNAi
aagagacagagcaacuugauu

SEQ ID NO: 50985 - RNA, 21 nt, RNAi
uuuucucugucucguugaacu

SEQ ID NO: 50986 - DNA, 21 bp, homo sapiens
gagacagagcaacttgaaatt

SEQ ID NO: 50987 - RNA, 21 nt, RNAi
gacagagcaacuugaaauuuu

SEQ ID NO: 50988 - RNA, 21 nt, RNAi
uucugucucguugaacuuuaa

SEQ ID NO: 50989 - DNA, 21 bp, homo sapiens
gacagagcaacttgaaattaa

SEQ ID NO: 50990 - RNA, 21 nt, RNAi
cagagcaacuugaaauuaauu

SEQ ID NO: 50991 - RNA, 21 nt, RNAi
uugucucguugaacuuuaauu

SEQ ID NO: 50992 - DNA, 21 bp, homo sapiens
gaagtccacatagagaagaat

SEQ ID NO: 50993 - RNA, 21 nt, RNAi
aguccacauagagaagaauuu

SEQ ID NO: 50994 - RNA, 21 nt, RNAi
uuucagguguaucucuucuua

SEQ ID NO: 50995 - DNA, 21 bp, homo sapiens
gagaagaatgatgctgaaaca

SEQ ID NO: 50996 - RNA, 21 nt, RNAi
gaagaaugaugcugaaacauu

SEQ ID NO: 50997 - RNA, 21 nt, RNAi
uucuucuuacuacgacuuugu

SEQ ID NO: 50998 - DNA, 21 bp, homo sapiens
gaagaatgatgctgaaacatt

SEQ ID NO: 50999 - RNA, 21 nt, RNAi
agaaugaugcugaaacauuuu

SEQ ID NO: 51000 - RNA, 21 nt, RNAi
uuucuuacuacgacuuuguaa

SEQ ID NO: 51001 - DNA, 21 bp, homo sapiens
gaatgatgctgaaacattgca

SEQ ID NO: 51002 - RNA, 21 nt, RNAi
augaugcugaaacauugcauu

SEQ ID NO: 51003 - RNA, 21 nt, RNAi
uuuacuacgacuuuguaacgu

SEQ ID NO: 51004 - DNA, 21 bp, homo sapiens
gatgctgaaacattgcagaaa

SEQ ID NO: 51005 - RNA, 21 nt, RNAi
ugcugaaacauugcagaaauu

SEQ ID NO: 51006 - RNA, 21 nt, RNAi
uuacgacuuuguaacgucuuu

SEQ ID NO: 51007 - DNA, 21 bp, homo sapiens
gaaacattgcagaaatgtctt

SEQ ID NO: 51008 - RNA, 21 nt, RNAi
aacauugcagaaaugucuuuu

SEQ ID NO: 51009 - RNA, 21 nt, RNAi
uuuuguaacgucuuuacagaa

SEQ ID NO: 51010 - DNA, 21 bp, homo sapiens
gaactgttgaagcagatgtcc

SEQ ID NO: 51011 - RNA, 21 nt, RNAi
acuguugaagcagauguccuu

SEQ ID NO: 51012 - RNA, 21 nt, RNAi
uuugacaacuucgucuacagg

SEQ ID NO: 51013 - DNA, 21 bp, homo sapiens
gaagcagatgtccatttcaac

SEQ ID NO: 51014 - RNA, 21 nt, RNAi
agcagauguccauuucaacuu

SEQ ID NO: 51015 - RNA, 21 nt, RNAi
uuucgucuacagguaaaguug

SEQ ID NO: 51016 - DNA, 21 bp, homo sapiens
gatgtccatttcaacaggctt

SEQ ID NO: 51017 - RNA, 21 nt, RNAi
uguccauuucaacaggcuuuu

SEQ ID NO: 51018 - RNA, 21 nt, RNAi
uuacagguaaaguuguccgaa

SEQ ID NO: 51019 - DNA, 21 bp, homo sapiens
gaatcatcgaatctttgattc

SEQ ID NO: 51020 - RNA, 21 nt, RNAi
aucaucgaaucuuugauucuu

SEQ ID NO: 51021 - RNA, 21 nt, RNAi
uuuaguagcuuagaaacuaag

SEQ ID NO: 51022 - DNA, 21 bp, homo sapiens
gaatctttgattcttcctgga

SEQ ID NO: 51023 - RNA, 21 nt, RNAi
aucuuugauucuuccuggauu

SEQ ID NO: 51024 - RNA, 21 nt, RNAi
uuuagaaacuaagaaggaccu

SEQ ID NO: 51025 - DNA, 21 bp, homo sapiens
gattcttcctggaataataag

SEQ ID NO: 51026 - RNA, 21 nt, RNAi
uucuuccuggaauaauaaguu

SEQ ID NO: 51027 - RNA, 21 nt, RNAi
uuaagaaggaccuuauuauuc

SEQ ID NO: 51028 - DNA, 21 bp, homo sapiens
gatgctgtggactacagaatc

SEQ ID NO: 51029 - RNA, 21 nt, RNAi
ugcuguggacuacagaaucuu

SEQ ID NO: 51030 - RNA, 21 nt, RNAi
uuacgacaccugaugucuuag

SEQ ID NO: 51031 - DNA, 21 bp, homo sapiens
gaaggtacagaaataaacagt

SEQ ID NO: 51032 - RNA, 21 nt, RNAi
agguacagaaauaaacaguuu

SEQ ID NO: 51033 - RNA, 21 nt, RNAi
uuuccaugucuuuauuuguca

SEQ ID NO: 51034 - DNA, 21 bp, homo sapiens
gaaataaacagtgatgatgag

SEQ ID NO: 51035 - RNA, 21 nt, RNAi
aauaaacagugaugaugaguu

SEQ ID NO: 51036 - RNA, 21 nt, RNAi
uuuuauuugucacuacuacuc

SEQ ID NO: 51037 - DNA, 21 bp, homo sapiens
gaagttgaagagactgctaca

SEQ ID NO: 51038 - RNA, 21 nt, RNAi
aguugaagagacugcuacauu

SEQ ID NO: 51039 - RNA, 21 nt, RNAi
uuucaacuucucugacgaugu

SEQ ID NO: 51040 - DNA, 21 bp, homo sapiens
gaagagactgctacagctaag

SEQ ID NO: 51041 - RNA, 21 nt, RNAi
agagacugcuacagcuaaguu

SEQ ID NO: 51042 - RNA, 21 nt, RNAi
uuucucugacgaugucgauuc

SEQ ID NO: 51043 - DNA, 21 bp, homo sapiens
gagactgctacagctaagaat

SEQ ID NO: 51044 - RNA, 21 nt, RNAi
gacugcuacagcuaagaauuu

SEQ ID NO: 51045 - RNA, 21 nt, RNAi
uucugacgaugucgauucuua

SEQ ID NO: 51046 - DNA, 21 bp, homo sapiens
gactgctacagctaagaatgt

SEQ ID NO: 51047 - RNA, 21 nt, RNAi
cugcuacagcuaagaauguuu

SEQ ID NO: 51048 - RNA, 21 nt, RNAi
uugacgaugucgauucuuaca

SEQ ID NO: 51049 - DNA, 21 bp, homo sapiens
gaatgttctgaaactcctttc

SEQ ID NO: 51050 - RNA, 21 nt, RNAi
auguucugaaacuccuuucuu

SEQ ID NO: 51051 - RNA, 21 nt, RNAi
uuuacaagacuuugaggaaag

SEQ ID NO: 51052 - DNA, 21 bp, homo sapiens
gaaactcctttctgatttctt

SEQ ID NO: 51053 - RNA, 21 nt, RNAi
aacuccuuucugauuucuuuu

SEQ ID NO: 51054 - RNA, 21 nt, RNAi
uuuugaggaaagacuaaagaa

SEQ ID NO: 51055 - DNA, 21 bp, homo sapiens
gatttcttagatagtgaggta

SEQ ID NO: 51056 - RNA, 21 nt, RNAi
uuucuuagauagugagguauu

SEQ ID NO: 51057 - RNA, 21 nt, RNAi
uuaaagaaucuaucacuccau

SEQ ID NO: 51058 - DNA, 21 bp, homo sapiens
gatagtgaggtatctgaactt

SEQ ID NO: 51059 - RNA, 21 nt, RNAi
uagugagguaucugaacuuuu

SEQ ID NO: 51060 - RNA, 21 nt, RNAi
uuaucacuccauagacuugaa

SEQ ID NO: 51061 - DNA, 21 bp, homo sapiens
gaggtatctgaacttaggact

SEQ ID NO: 51062 - RNA, 21 nt, RNAi
gguaucugaacuuaggacuuu

SEQ ID NO: 51063 - RNA, 21 nt, RNAi
uuccauagacuugaauccuga

SEQ ID NO: 51064 - DNA, 21 bp, homo sapiens
gaacttaggactggagctgca

SEQ ID NO: 51065 - RNA, 21 nt, RNAi
acuuaggacuggagcugcauu

SEQ ID NO: 51066 - RNA, 21 nt, RNAi
uuugaauccugaccucgacgu

SEQ ID NO: 51067 - DNA, 21 bp, homo sapiens
gactggagctgcagaaggact

SEQ ID NO: 51068 - RNA, 21 nt, RNAi
cuggagcugcagaaggacuuu

SEQ ID NO: 51069 - RNA, 21 nt, RNAi
uugaccucgacgucuuccuga

SEQ ID NO: 51070 - DNA, 21 bp, homo sapiens
gagctgcagaaggactagcca

SEQ ID NO: 51071 - RNA, 21 nt, RNAi
gcugcagaaggacuagccauu

SEQ ID NO: 51072 - RNA, 21 nt, RNAi
uucgacgucuuccugaucggu

SEQ ID NO: 51073 - DNA, 21 bp, homo sapiens
gaaggactagccaagctgatg

SEQ ID NO: 51074 - RNA, 21 nt, RNAi
aggacuagccaagcugauguu

SEQ ID NO: 51075 - RNA, 21 nt, RNAi
uuuccugaucgguucgacuac

SEQ ID NO: 51076 - DNA, 21 bp, homo sapiens
gactagccaagctgatgttct

SEQ ID NO: 51077 - RNA, 21 nt, RNAi
cuagccaagcugauguucuuu

SEQ ID NO: 51078 - RNA, 21 nt, RNAi
uugaucgguucgacuacaaga

SEQ ID NO: 51079 - DNA, 21 bp, homo sapiens
gactgaagaggatgttcaact

SEQ ID NO: 51080 - RNA, 21 nt, RNAi
cugaagaggauguucaacuuu

SEQ ID NO: 51081 - RNA, 21 nt, RNAi
uugacuucuccuacaaguuga

SEQ ID NO: 51082 - DNA, 21 bp, homo sapiens
gaagaggatgttcaacttcga

SEQ ID NO: 51083 - RNA, 21 nt, RNAi
agaggauguucaacuucgauu

SEQ ID NO: 51084 - RNA, 21 nt, RNAi
uuucuccuacaaguugaagcu

SEQ ID NO: 51085 - DNA, 21 bp, homo sapiens
gaggatgttcaacttcgacat

SEQ ID NO: 51086 - RNA, 21 nt, RNAi
ggauguucaacuucgacauuu

SEQ ID NO: 51087 - RNA, 21 nt, RNAi
uuccuacaaguugaagcugua

SEQ ID NO: 51088 - DNA, 21 bp, homo sapiens
gatgttcaacttcgacattgc

SEQ ID NO: 51089 - RNA, 21 nt, RNAi
uguucaacuucgacauugcuu

SEQ ID NO: 51090 - RNA, 21 nt, RNAi
uuacaaguugaagcuguaacg

SEQ ID NO: 51091 - DNA, 21 bp, homo sapiens
gacattgcctaggcgtgttct

SEQ ID NO: 51092 - RNA, 21 nt, RNAi
cauugccuaggcguguucuuu

SEQ ID NO: 51093 - RNA, 21 nt, RNAi
uuguaacggauccgcacaaga

SEQ ID NO: 51094 - DNA, 21 bp, homo sapiens
gactaatcaggaatgctttga

SEQ ID NO: 51095 - RNA, 21 nt, RNAi
cuaaucaggaaugcuuugauu

SEQ ID NO: 51096 - RNA, 21 nt, RNAi
uugauuaguccuuacgaaacu

SEQ ID NO: 51097 - DNA, 21 bp, homo sapiens
gatatcacaaatgttgctgag

SEQ ID NO: 51098 - RNA, 21 nt, RNAi
uaucacaaauguugcugaguu

SEQ ID NO: 51099 - RNA, 21 nt, RNAi
uuauaguguuuacaacgacuc

SEQ ID NO: 51100 - DNA, 21 bp, homo sapiens
gagttacttgtagatttgaca

SEQ ID NO: 51101 - RNA, 21 nt, RNAi
guuacuuguagauuugacauu

SEQ ID NO: 51102 - RNA, 21 nt, RNAi
uucaaugaacaucuaaacugu

SEQ ID NO: 51103 - DNA, 21 bp, homo sapiens
gatttgacaagaccaagtgga

SEQ ID NO: 51104 - RNA, 21 nt, RNAi
uuugacaagaccaaguggauu

SEQ ID NO: 51105 - RNA, 21 nt, RNAi
uuaaacuguucugguucaccu

SEQ ID NO: 51106 - DNA, 21 bp, homo sapiens
gacaagaccaagtggattaaa

SEQ ID NO: 51107 - RNA, 21 nt, RNAi
caagaccaaguggauuaaauu

SEQ ID NO: 51108 - RNA, 21 nt, RNAi
uuguucugguucaccuaauuu

SEQ ID NO: 51109 - DNA, 21 bp, homo sapiens
gaccaagtggattaaatcctc

SEQ ID NO: 51110 - RNA, 21 nt, RNAi
ccaaguggauuaaauccucuu

SEQ ID NO: 51111 - RNA, 21 nt, RNAi
uugguucaccuaauuuaggag

SEQ ID NO: 51112 - DNA, 21 bp, homo sapiens
gattaaatcctcaggccaaga

SEQ ID NO: 51113 - RNA, 21 nt, RNAi
uuaaauccucaggccaagauu

SEQ ID NO: 51114 - RNA, 21 nt, RNAi
uuaauuuaggaguccgguucu

SEQ ID NO: 51115 - DNA, 21 bp, homo sapiens
gattatcaggccttaacagta

SEQ ID NO: 51116 - RNA, 21 nt, RNAi
uuaucaggccuuaacaguauu

SEQ ID NO: 51117 - RNA, 21 nt, RNAi
uuaauaguccggaauugucau

SEQ ID NO: 51118 - DNA, 21 bp, homo sapiens
gagatcttaacaagtccgtgc

SEQ ID NO: 51119 - RNA, 21 nt, RNAi
gaucuuaacaaguccgugcuu

SEQ ID NO: 51120 - RNA, 21 nt, RNAi
uucuagaauuguucaggcacg

SEQ ID NO: 51121 - DNA, 21 bp, homo sapiens
gatcttaacaagtccgtgctc

SEQ ID NO: 51122 - RNA, 21 nt, RNAi
ucuuaacaaguccgugcucuu

SEQ ID NO: 51123 - RNA, 21 nt, RNAi
uuagaauuguucaggcacgag

SEQ ID NO: 51124 - DNA, 21 bp, homo sapiens
gagttctttagaactcagtag

SEQ ID NO: 51125 - RNA, 21 nt, RNAi
guucuuuagaacucaguaguu

SEQ ID NO: 51126 - RNA, 21 nt, RNAi
uucaagaaaucuugagucauc

SEQ ID NO: 51127 - DNA, 21 bp, homo sapiens
gaactcagtagccatcttgca

SEQ ID NO: 51128 - RNA, 21 nt, RNAi
acucaguagccaucuugcauu

SEQ ID NO: 51129 - RNA, 21 nt, RNAi
uuugagucaucgguagaacgu

SEQ ID NO: 51130 - DNA, 21 bp, homo sapiens
gatcttctggttctattgaat

SEQ ID NO: 51131 - RNA, 21 nt, RNAi
ucuucugguucuauugaauuu

SEQ ID NO: 51132 - RNA, 21 nt, RNAi
uuagaagaccaagauaacuua

SEQ ID NO: 51133 - DNA, 21 bp, homo sapiens
gaatgagattctggagcaagt

SEQ ID NO: 51134 - RNA, 21 nt, RNAi
augagauucuggagcaaguuu

SEQ ID NO: 51135 - RNA, 21 nt, RNAi
uuuacucuaagaccucguuca

SEQ ID NO: 51136 - DNA, 21 bp, homo sapiens
gataggacatgtctgagagct

SEQ ID NO: 51137 - RNA, 21 nt, RNAi
uaggacaugucugagagcuuu

SEQ ID NO: 51138 - RNA, 21 nt, RNAi
uuauccuguacagacucucga

SEQ ID NO: 51139 - DNA, 21 bp, homo sapiens
gacatgtctgagagctttgga

SEQ ID NO: 51140 - RNA, 21 nt, RNAi
caugucugagagcuuuggauu

SEQ ID NO: 51141 - RNA, 21 nt, RNAi
uuguacagacucucgaaaccu

SEQ ID NO: 51142 - DNA, 21 bp, homo sapiens
gaaataaagaatttggtgacc

SEQ ID NO: 51143 - RNA, 21 nt, RNAi
aauaaagaauuuggugaccuu

SEQ ID NO: 51144 - RNA, 21 nt, RNAi
uuuuauuucuuaaaccacugg

SEQ ID NO: 51145 - DNA, 21 bp, homo sapiens
gaatttggtgaccaagctgaa

SEQ ID NO: 51146 - RNA, 21 nt, RNAi
auuuggugaccaagcugaauu

SEQ ID NO: 51147 - RNA, 21 nt, RNAi
uuuaaaccacugguucgacuu

SEQ ID NO: 51148 - DNA, 21 bp, homo sapiens
gaccaagctgaagcagcacag

SEQ ID NO: 51149 - RNA, 21 nt, RNAi
ccaagcugaagcagcacaguu

SEQ ID NO: 51150 - RNA, 21 nt, RNAi
uugguucgacuucgucguguc

SEQ ID NO: 51151 - DNA, 21 bp, homo sapiens
gaagcagcacaggatgccacc

SEQ ID NO: 51152 - RNA, 21 nt, RNAi
agcagcacaggaugccaccuu

SEQ ID NO: 51153 - RNA, 21 nt, RNAi
uuucgucguguccuacggugg

SEQ ID NO: 51154 - DNA, 21 bp, homo sapiens
gatgccaccttgactacaact

SEQ ID NO: 51155 - RNA, 21 nt, RNAi
ugccaccuugacuacaacuuu

SEQ ID NO: 51156 - RNA, 21 nt, RNAi
uuacgguggaacugauguuga

SEQ ID NO: 51157 - DNA, 21 bp, homo sapiens
gaagtatatatgactccactc

SEQ ID NO: 51158 - RNA, 21 nt, RNAi
aguauauaugacuccacucuu

SEQ ID NO: 51159 - RNA, 21 nt, RNAi
uuucauauauacugaggugag

SEQ ID NO: 51160 - DNA, 21 bp, homo sapiens
gactaacagaggacagagaaa

SEQ ID NO: 51161 - RNA, 21 nt, RNAi
cuaacagaggacagagaaauu

SEQ ID NO: 51162 - RNA, 21 nt, RNAi
uugauugucuccugucucuuu

SEQ ID NO: 51163 - DNA, 21 bp, homo sapiens
gacagtttcagctaggacgaa

SEQ ID NO: 51164 - RNA, 21 nt, RNAi
caguuucagcuaggacgaauu

SEQ ID NO: 51165 - RNA, 21 nt, RNAi
uugucaaagucgauccugcuu

SEQ ID NO: 51166 - DNA, 21 bp, homo sapiens
gacgaacaggaggtgtcagac

SEQ ID NO: 51167 - RNA, 21 nt, RNAi
cgaacaggaggugucagacuu

SEQ ID NO: 51168 - RNA, 21 nt, RNAi
uugcuuguccuccacagucug

SEQ ID NO: 51169 - DNA, 21 bp, homo sapiens
gaacaggaggtgtcagactgc

SEQ ID NO: 51170 - RNA, 21 nt, RNAi
acaggaggugucagacugcuu

SEQ ID NO: 51171 - RNA, 21 nt, RNAi
uuuguccuccacagucugacg

SEQ ID NO: 51172 - DNA, 21 bp, homo sapiens
gaggtgtcagactgctgaagc

SEQ ID NO: 51173 - RNA, 21 nt, RNAi
ggugucagacugcugaagcuu

SEQ ID NO: 51174 - RNA, 21 nt, RNAi
uuccacagucugacgacuucg

SEQ ID NO: 51175 - DNA, 21 bp, homo sapiens
gactgctgaagccgactctga

SEQ ID NO: 51176 - RNA, 21 nt, RNAi
cugcugaagccgacucugauu

SEQ ID NO: 51177 - RNA, 21 nt, RNAi
uugacgacuucggcugagacu

SEQ ID NO: 51178 - DNA, 21 bp, homo sapiens
gaagccgactctgaaagtgat

SEQ ID NO: 51179 - RNA, 21 nt, RNAi
agccgacucugaaagugauuu

SEQ ID NO: 51180 - RNA, 21 nt, RNAi
uuucggcugagacuuucacua

SEQ ID NO: 51181 - DNA, 21 bp, homo sapiens
gactctgaaagtgatcatgaa

SEQ ID NO: 51182 - RNA, 21 nt, RNAi
cucugaaagugaucaugaauu

SEQ ID NO: 51183 - RNA, 21 nt, RNAi
uugagacuuucacuaguacuu

SEQ ID NO: 51184 - DNA, 21 bp, homo sapiens
gaaagtgatcatgaagttcca

SEQ ID NO: 51185 - RNA, 21 nt, RNAi
aagugaucaugaaguuccauu

SEQ ID NO: 51186 - RNA, 21 nt, RNAi
uuuucacuaguacuucaaggu

SEQ ID NO: 51187 - DNA, 21 bp, homo sapiens
gatcatgaagttccagaacca

SEQ ID NO: 51188 - RNA, 21 nt, RNAi
ucaugaaguuccagaaccauu

SEQ ID NO: 51189 - RNA, 21 nt, RNAi
uuaguacuucaaggucuuggu

SEQ ID NO: 51190 - DNA, 21 bp, homo sapiens
gaagttccagaaccagaatca

SEQ ID NO: 51191 - RNA, 21 nt, RNAi
aguuccagaaccagaaucauu

SEQ ID NO: 51192 - RNA, 21 nt, RNAi
uuucaaggucuuggucuuagu

SEQ ID NO: 51193 - DNA, 21 bp, homo sapiens
gaaccagaatcagaaatgaag

SEQ ID NO: 51194 - RNA, 21 nt, RNAi
accagaaucagaaaugaaguu

SEQ ID NO: 51195 - RNA, 21 nt, RNAi
uuuggucuuagucuuuacuuc

SEQ ID NO: 51196 - DNA, 21 bp, homo sapiens
gaatcagaaatgaagatgaga

SEQ ID NO: 51197 - RNA, 21 nt, RNAi
aucagaaaugaagaugagauu

SEQ ID NO: 51198 - RNA, 21 nt, RNAi
uuuagucuuuacuucuacucu

SEQ ID NO: 51199 - DNA, 21 bp, homo sapiens
  misc_feature (18)..(18): n is a, c, g, or t
gaaatgaagatgagactncca

SEQ ID NO: 51200 - RNA, 21 nt, RNAi
  misc_feature (16)..(16): n is a, c, g, or u
aaugaagaugagacunccauu

SEQ ID NO: 51201 - RNA, 20 nt, RNAi
uuuuacuucuacucugaggu

SEQ ID NO: 51202 - DNA, 21 bp, homo sapiens
  misc_feature (13)..(13): n is a, c, g, or t
gaagatgagactnccaagacg

SEQ ID NO: 51203 - RNA, 21 nt, RNAi
  misc_feature (11)..(11): n is a, c, g, or u
agaugagacunccaagacguu

SEQ ID NO: 51204 - RNA, 20 nt, RNAi
uuucuacucugagguucugc

SEQ ID NO: 51205 - DNA, 21 bp, homo sapiens
  misc_feature (10)..(10): n is a, c, g, or t
gatgagactnccaagacgagc

SEQ ID NO: 51206 - RNA, 21 nt, RNAi
  misc_feature (8)..(8): n is a, c, g, or u
ugagacunccaagacgagcuu

SEQ ID NO: 51207 - RNA, 20 nt, RNAi
uuacucugagguucugcucg

SEQ ID NO: 51208 - DNA, 21 bp, homo sapiens
  misc_feature (7)..(7): n is a, c, g, or t
gagactnccaagacgagccaa

SEQ ID NO: 51209 - RNA, 21 nt, RNAi
  misc_feature (5)..(5): n is a, c, g, or u
gacunccaagacgagccaauu

SEQ ID NO: 51210 - RNA, 20 nt, RNAi
uucugagguucugcucgguu

SEQ ID NO: 51211 - DNA, 21 bp, homo sapiens
  misc_feature (5)..(5): n is a, c, g, or t
  misc_feature (16)..(16): n is a, c, g, or t
gaaanacgatggaggnggaat

SEQ ID NO: 51212 - RNA, 21 nt, RNAi
  misc_feature (3)..(3): n is a, c, g, or u
  misc_feature (14)..(14): n is a, c, g, or u
aanacgauggaggnggaauuu

SEQ ID NO: 51213 - RNA, 19 nt, RNAi
uuuuugcuaccuccccuua

SEQ ID NO: 51214 - DNA, 21 bp, homo sapiens
  misc_feature (9)..(9): n is a, c, g, or t
gatggaggnggaatcctttaa

SEQ ID NO: 51215 - RNA, 21 nt, RNAi
  misc_feature (7)..(7): n is a, c, g, or u
uggaggnggaauccuuuaauu

SEQ ID NO: 51216 - RNA, 20 nt, RNAi
uuaccuccccuuaggaaauu

SEQ ID NO: 51217 - DNA, 21 bp, homo sapiens
  misc_feature (5)..(5): n is a, c, g, or t
gaggnggaatcctttaagatt

SEQ ID NO: 51218 - RNA, 21 nt, RNAi
  misc_feature (3)..(3): n is a, c, g, or u
ggnggaauccuuuaagauuuu

SEQ ID NO: 51219 - RNA, 20 nt, RNAi
uuccccuuaggaaauucuaa

SEQ ID NO: 51220 - DNA, 21 bp, homo sapiens
gaatcctttaagattatgtcc

SEQ ID NO: 51221 - RNA, 21 nt, RNAi
auccuuuaagauuauguccuu

SEQ ID NO: 51222 - RNA, 21 nt, RNAi
uuuaggaaauucuaauacagg

SEQ ID NO: 51223 - DNA, 21 bp, homo sapiens
gattatgtccagttatttgct

SEQ ID NO: 51224 - RNA, 21 nt, RNAi
uuauguccaguuauuugcuuu

SEQ ID NO: 51225 - RNA, 21 nt, RNAi
uuaauacaggucaauaaacga

SEQ ID NO: 51226 - DNA, 21 bp, homo sapiens
taaggaggcctttcggctggc

SEQ ID NO: 51227 - RNA, 21 nt, RNAi
aggaggccuuucggcuggcuu

SEQ ID NO: 51228 - RNA, 21 nt, RNAi
uuuccuccggaaagccgaccg

SEQ ID NO: 51229 - DNA, 21 bp, homo sapiens
taccgcacgatggatgataag

SEQ ID NO: 51230 - RNA, 21 nt, RNAi
ccgcacgauggaugauaaguu

SEQ ID NO: 51231 - RNA, 21 nt, RNAi
uuggcgugcuaccuacuauuc

SEQ ID NO: 51232 - DNA, 21 bp, homo sapiens
tatggtggtctataaacgtga

SEQ ID NO: 51233 - RNA, 21 nt, RNAi
ugguggucuauaaacgugauu

SEQ ID NO: 51234 - RNA, 21 nt, RNAi
uuaccaccagauauuugcacu

SEQ ID NO: 51235 - DNA, 21 bp, homo sapiens
tataaacgtgaaccagctgtg

SEQ ID NO: 51236 - RNA, 21 nt, RNAi
uaaacgugaaccagcuguguu

SEQ ID NO: 51237 - RNA, 21 nt, RNAi
uuauuugcacuuggucgacac

SEQ ID NO: 51238 - DNA, 21 bp, homo sapiens
taaacgtgaaccagctgtgga

SEQ ID NO: 51239 - RNA, 21 nt, RNAi
aacgugaaccagcuguggauu

SEQ ID NO: 51240 - RNA, 21 nt, RNAi
uuuugcacuuggucgacaccu

SEQ ID NO: 51241 - DNA, 21 bp, homo sapiens
tagaatttgcagcaaagtttg

SEQ ID NO: 51242 - RNA, 21 nt, RNAi
gaauuugcagcaaaguuuguu

SEQ ID NO: 51243 - RNA, 21 nt, RNAi
uucuuaaacgucguuucaaac

SEQ ID NO: 51244 - DNA, 21 bp, homo sapiens
tacctcatttcaccaatcaga

SEQ ID NO: 51245 - RNA, 21 nt, RNAi
ccucauuucaccaaucagauu

SEQ ID NO: 51246 - RNA, 21 nt, RNAi
uuggaguaaagugguuagucu

SEQ ID NO: 51247 - DNA, 21 bp, homo sapiens
tatggaagatgatgaggaaga

SEQ ID NO: 51248 - RNA, 21 nt, RNAi
uggaagaugaugaggaagauu

SEQ ID NO: 51249 - RNA, 21 nt, RNAi
uuaccuucuacuacuccuucu

SEQ ID NO: 51250 - DNA, 21 bp, homo sapiens
taaagtctcatgaagcaaaca

SEQ ID NO: 51251 - RNA, 21 nt, RNAi
aagucucaugaagcaaacauu

SEQ ID NO: 51252 - RNA, 21 nt, RNAi
uuuucagaguacuucguuugu

SEQ ID NO: 51253 - DNA, 21 bp, homo sapiens
tagagtgtgcctgctcataaa

SEQ ID NO: 51254 - RNA, 21 nt, RNAi
gagugugccugcucauaaauu

SEQ ID NO: 51255 - RNA, 21 nt, RNAi
uucucacacggacgaguauuu

SEQ ID NO: 51256 - DNA, 21 bp, homo sapiens
tacaggcagttctggcgcttt

SEQ ID NO: 51257 - RNA, 21 nt, RNAi
caggcaguucuggcgcuuuuu

SEQ ID NO: 51258 - RNA, 21 nt, RNAi
uuguccgucaagaccgcgaaa

SEQ ID NO: 51259 - DNA, 21 bp, homo sapiens
tatcatgtattgcaccatcag

SEQ ID NO: 51260 - RNA, 21 nt, RNAi
ucauguauugcaccaucaguu

SEQ ID NO: 51261 - RNA, 21 nt, RNAi
uuaguacauaacgugguaguc

SEQ ID NO: 51262 - DNA, 21 bp, homo sapiens
tattgcaccatcagcaaagac

SEQ ID NO: 51263 - RNA, 21 nt, RNAi
uugcaccaucagcaaagacuu

SEQ ID NO: 51264 - RNA, 21 nt, RNAi
uuaacgugguagucguuucug

SEQ ID NO: 51265 - DNA, 21 bp, homo sapiens
tatgagagctatgtccattgc

SEQ ID NO: 51266 - RNA, 21 nt, RNAi
ugagagcuauguccauugcuu

SEQ ID NO: 51267 - RNA, 21 nt, RNAi
uuacucucgauacagguaacg

SEQ ID NO: 51268 - DNA, 21 bp, homo sapiens
tatgtccattgctcagagagt

SEQ ID NO: 51269 - RNA, 21 nt, RNAi
uguccauugcucagagaguuu

SEQ ID NO: 51270 - RNA, 21 nt, RNAi
uuacagguaacgagucucuca

SEQ ID NO: 51271 - DNA, 21 bp, homo sapiens
taatgctccttcaacaaggtc

SEQ ID NO: 51272 - RNA, 21 nt, RNAi
augcuccuucaacaaggucuu

SEQ ID NO: 51273 - RNA, 21 nt, RNAi
uuuacgaggaaguuguuccag

SEQ ID NO: 51274 - DNA, 21 bp, homo sapiens
taatgacagatcagatgctgt

SEQ ID NO: 51275 - RNA, 21 nt, RNAi
augacagaucagaugcuguuu

SEQ ID NO: 51276 - RNA, 21 nt, RNAi
uuuacugucuagucuacgaca

SEQ ID NO: 51277 - DNA, 21 bp, homo sapiens
tatgcagaagcatcttcttca

SEQ ID NO: 51278 - RNA, 21 nt, RNAi
ugcagaagcaucuucuucauu

SEQ ID NO: 51279 - RNA, 21 nt, RNAi
uuacgucuucguagaagaagu

SEQ ID NO: 51280 - DNA, 21 bp, homo sapiens
tatcttagagttgctccatcg

SEQ ID NO: 51281 - RNA, 21 nt, RNAi
ucuuagaguugcuccaucguu

SEQ ID NO: 51282 - RNA, 21 nt, RNAi
uuagaaucucaacgagguagc

SEQ ID NO: 51283 - DNA, 21 bp, homo sapiens
tagagttgctccatcggttgg

SEQ ID NO: 51284 - RNA, 21 nt, RNAi
gaguugcuccaucgguugguu

SEQ ID NO: 51285 - RNA, 21 nt, RNAi
uucucaacgagguagccaacc

SEQ ID NO: 51286 - DNA, 21 bp, homo sapiens
taactcctctcagtgaactgg

SEQ ID NO: 51287 - RNA, 21 nt, RNAi
acuccucucagugaacugguu

SEQ ID NO: 51288 - RNA, 21 nt, RNAi
uuugaggagagucacuugacc

SEQ ID NO: 51289 - DNA, 21 bp, homo sapiens
taactcctgaaattgctttgt

SEQ ID NO: 51290 - RNA, 21 nt, RNAi
acuccugaaauugcuuuguuu

SEQ ID NO: 51291 - RNA, 21 nt, RNAi
uuugaggacuuuaacgaaaca

SEQ ID NO: 51292 - DNA, 21 bp, homo sapiens
tattgagttacatccagagca

SEQ ID NO: 51293 - RNA, 21 nt, RNAi
uugaguuacauccagagcauu

SEQ ID NO: 51294 - RNA, 21 nt, RNAi
uuaacucaauguaggucucgu

SEQ ID NO: 51295 - DNA, 21 bp, homo sapiens
tacatccagagcattccagtt

SEQ ID NO: 51296 - RNA, 21 nt, RNAi
cauccagagcauuccaguuuu

SEQ ID NO: 51297 - RNA, 21 nt, RNAi
uuguaggucucguaaggucaa

SEQ ID NO: 51298 - DNA, 21 bp, homo sapiens
taatgaagaacacagaggtga

SEQ ID NO: 51299 - RNA, 21 nt, RNAi
augaagaacacagaggugauu

SEQ ID NO: 51300 - RNA, 21 nt, RNAi
uuuacuucuugugucuccacu

SEQ ID NO: 51301 - DNA, 21 bp, homo sapiens
tattaagtctttggataccag

SEQ ID NO: 51302 - RNA, 21 nt, RNAi
uuaagucuuuggauaccaguu

SEQ ID NO: 51303 - RNA, 21 nt, RNAi
uuaauucagaaaccuaugguc

SEQ ID NO: 51304 - DNA, 21 bp, homo sapiens
taagtctttggataccagtga

SEQ ID NO: 51305 - RNA, 21 nt, RNAi
agucuuuggauaccagugauu

SEQ ID NO: 51306 - RNA, 21 nt, RNAi
uuucagaaaccuauggucacu

SEQ ID NO: 51307 - DNA, 21 bp, homo sapiens
taccagtgaagaaggaggaag

SEQ ID NO: 51308 - RNA, 21 nt, RNAi
ccagugaagaaggaggaaguu

SEQ ID NO: 51309 - RNA, 21 nt, RNAi
uuggucacuucuuccuccuuc

SEQ ID NO: 51310 - DNA, 21 bp, homo sapiens
tactccacatcattatagatg

SEQ ID NO: 51311 - RNA, 21 nt, RNAi
cuccacaucauuauagauguu

SEQ ID NO: 51312 - RNA, 21 nt, RNAi
uugagguguaguaauaucuac

SEQ ID NO: 51313 - DNA, 21 bp, homo sapiens
tactgttggtgttaataacga

SEQ ID NO: 51314 - RNA, 21 nt, RNAi
cuguugguguuaauaacgauu

SEQ ID NO: 51315 - RNA, 21 nt, RNAi
uugacaaccacaauuauugcu

SEQ ID NO: 51316 - DNA, 21 bp, homo sapiens
taataacgatccagctgatgt

SEQ ID NO: 51317 - RNA, 21 nt, RNAi
auaacgauccagcugauguuu

SEQ ID NO: 51318 - RNA, 21 nt, RNAi
uuuauugcuaggucgacuaca

SEQ ID NO: 51319 - DNA, 21 bp, homo sapiens
taacgatccagctgatgtaag

SEQ ID NO: 51320 - RNA, 21 nt, RNAi
acgauccagcugauguaaguu

SEQ ID NO: 51321 - RNA, 21 nt, RNAi
uuugcuaggucgacuacauuc

SEQ ID NO: 51322 - DNA, 21 bp, homo sapiens
taagcttatcgaagccaaaga

SEQ ID NO: 51323 - RNA, 21 nt, RNAi
agcuuaucgaagccaaagauu

SEQ ID NO: 51324 - RNA, 21 nt, RNAi
uuucgaauagcuucgguuucu

SEQ ID NO: 51325 - DNA, 21 bp, homo sapiens
tatcgaagccaaagaagcttt

SEQ ID NO: 51326 - RNA, 21 nt, RNAi
ucgaagccaaagaagcuuuuu

SEQ ID NO: 51327 - RNA, 21 nt, RNAi
uuagcuucgguuucuucgaaa

SEQ ID NO: 51328 - DNA, 21 bp, homo sapiens
tagaagatgccagaataaacc

SEQ ID NO: 51329 - RNA, 21 nt, RNAi
gaagaugccagaauaaaccuu

SEQ ID NO: 51330 - RNA, 21 nt, RNAi
uucuucuacggucuuauuugg

SEQ ID NO: 51331 - DNA, 21 bp, homo sapiens
taaagaagtccacatagagaa

SEQ ID NO: 51332 - RNA, 21 nt, RNAi
aagaaguccacauagagaauu

SEQ ID NO: 51333 - RNA, 21 nt, RNAi
uuuucuucagguguaucucuu

SEQ ID NO: 51334 - DNA, 21 bp, homo sapiens
tagagaagaatgatgctgaaa

SEQ ID NO: 51335 - RNA, 21 nt, RNAi
gagaagaaugaugcugaaauu

SEQ ID NO: 51336 - RNA, 21 nt, RNAi
uucucuucuuacuacgacuuu

SEQ ID NO: 51337 - DNA, 21 bp, homo sapiens
tatgctatgaactgttgaagc

SEQ ID NO: 51338 - RNA, 21 nt, RNAi
ugcuaugaacuguugaagcuu

SEQ ID NO: 51339 - RNA, 21 nt, RNAi
uuacgauacuugacaacuucg

SEQ ID NO: 51340 - DNA, 21 bp, homo sapiens
tatgaactgttgaagcagatg

SEQ ID NO: 51341 - RNA, 21 nt, RNAi
ugaacuguugaagcagauguu

SEQ ID NO: 51342 - RNA, 21 nt, RNAi
uuacuugacaacuucgucuac

SEQ ID NO: 51343 - DNA, 21 bp, homo sapiens
taagtgcaaccatcaatggaa

SEQ ID NO: 51344 - RNA, 21 nt, RNAi
agugcaaccaucaauggaauu

SEQ ID NO: 51345 - RNA, 21 nt, RNAi
uuucacguugguaguuaccuu

SEQ ID NO: 51346 - DNA, 21 bp, homo sapiens
taagtgctttaaaggcaatct

SEQ ID NO: 51347 - RNA, 21 nt, RNAi
agugcuuuaaaggcaaucuuu

SEQ ID NO: 51348 - RNA, 21 nt, RNAi
uuucacgaaauuuccguuaga

SEQ ID NO: 51349 - DNA, 21 bp, homo sapiens
taaaggcaatctttgaccaac

SEQ ID NO: 51350 - RNA, 21 nt, RNAi
aaggcaaucuuugaccaacuu

SEQ ID NO: 51351 - RNA, 21 nt, RNAi
uuuuccguuagaaacugguug

SEQ ID NO: 51352 - DNA, 21 bp, homo sapiens
taaacagtgatgatgagcaag

SEQ ID NO: 51353 - RNA, 21 nt, RNAi
aacagugaugaugagcaaguu

SEQ ID NO: 51354 - RNA, 21 nt, RNAi
uuuugucacuacuacucguuc

SEQ ID NO: 51355 - DNA, 21 bp, homo sapiens
tacagctaagaatgttctgaa

SEQ ID NO: 51356 - RNA, 21 nt, RNAi
cagcuaagaauguucugaauu

SEQ ID NO: 51357 - RNA, 21 nt, RNAi
uugucgauucuuacaagacuu

SEQ ID NO: 51358 - DNA, 21 bp, homo sapiens
taagaatgttctgaaactcct

SEQ ID NO: 51359 - RNA, 21 nt, RNAi
agaauguucugaaacuccuuu

SEQ ID NO: 51360 - RNA, 21 nt, RNAi
uuucuuacaagacuuugagga

SEQ ID NO: 51361 - DNA, 21 bp, homo sapiens
tagatagtgaggtatctgaac

SEQ ID NO: 51362 - RNA, 21 nt, RNAi
gauagugagguaucugaacuu

SEQ ID NO: 51363 - RNA, 21 nt, RNAi
uucuaucacuccauagacuug

SEQ ID NO: 51364 - DNA, 21 bp, homo sapiens
tagtgaggtatctgaacttag

SEQ ID NO: 51365 - RNA, 21 nt, RNAi
gugagguaucugaacuuaguu

SEQ ID NO: 51366 - RNA, 21 nt, RNAi
uucacuccauagacuugaauc

SEQ ID NO: 51367 - DNA, 21 bp, homo sapiens
tatctgaacttaggactggag

SEQ ID NO: 51368 - RNA, 21 nt, RNAi
ucugaacuuaggacuggaguu

SEQ ID NO: 51369 - RNA, 21 nt, RNAi
uuagacuugaauccugaccuc

SEQ ID NO: 51370 - DNA, 21 bp, homo sapiens
taggactggagctgcagaagg

SEQ ID NO: 51371 - RNA, 21 nt, RNAi
ggacuggagcugcagaagguu

SEQ ID NO: 51372 - RNA, 21 nt, RNAi
uuccugaccucgacgucuucc

SEQ ID NO: 51373 - DNA, 21 bp, homo sapiens
tagccaagctgatgttctctg

SEQ ID NO: 51374 - RNA, 21 nt, RNAi
gccaagcugauguucucuguu

SEQ ID NO: 51375 - RNA, 21 nt, RNAi
uucgguucgacuacaagagac

SEQ ID NO: 51376 - DNA, 21 bp, homo sapiens
tatggtacaatcctgtgactg

SEQ ID NO: 51377 - RNA, 21 nt, RNAi
ugguacaauccugugacuguu

SEQ ID NO: 51378 - RNA, 21 nt, RNAi
uuaccauguuaggacacugac

SEQ ID NO: 51379 - DNA, 21 bp, homo sapiens
tacaatcctgtgactgaagag

SEQ ID NO: 51380 - RNA, 21 nt, RNAi
caauccugugacugaagaguu

SEQ ID NO: 51381 - RNA, 21 nt, RNAi
uuguuaggacacugacuucuc

SEQ ID NO: 51382 - DNA, 21 bp, homo sapiens
tatgcaagcaggactaatcag

SEQ ID NO: 51383 - RNA, 21 nt, RNAi
ugcaagcaggacuaaucaguu

SEQ ID NO: 51384 - RNA, 21 nt, RNAi
uuacguucguccugauuaguc

SEQ ID NO: 51385 - DNA, 21 bp, homo sapiens
taatcaggaatgctttgaaga

SEQ ID NO: 51386 - RNA, 21 nt, RNAi
aucaggaaugcuuugaagauu

SEQ ID NO: 51387 - RNA, 21 nt, RNAi
uuuaguccuuacgaaacuucu

SEQ ID NO: 51388 - DNA, 21 bp, homo sapiens
tatcacaaatgttgctgagtt

SEQ ID NO: 51389 - RNA, 21 nt, RNAi
ucacaaauguugcugaguuuu

SEQ ID NO: 51390 - RNA, 21 nt, RNAi
uuaguguuuacaacgacucaa

SEQ ID NO: 51391 - DNA, 21 bp, homo sapiens
tacttgtagatttgacaagac

SEQ ID NO: 51392 - RNA, 21 nt, RNAi
cuuguagauuugacaagacuu

SEQ ID NO: 51393 - RNA, 21 nt, RNAi
uugaacaucuaaacuguucug

SEQ ID NO: 51394 - DNA, 21 bp, homo sapiens
tagatttgacaagaccaagtg

SEQ ID NO: 51395 - RNA, 21 nt, RNAi
gauuugacaagaccaaguguu

SEQ ID NO: 51396 - RNA, 21 nt, RNAi
uucuaaacuguucugguucac

SEQ ID NO: 51397 - DNA, 21 bp, homo sapiens
taaatcctcaggccaagactt

SEQ ID NO: 51398 - RNA, 21 nt, RNAi
aauccucaggccaagacuuuu

SEQ ID NO: 51399 - RNA, 21 nt, RNAi
uuuuaggaguccgguucugaa

SEQ ID NO: 51400 - DNA, 21 bp, homo sapiens
tatcaggccttaacagtacat

SEQ ID NO: 51401 - RNA, 21 nt, RNAi
ucaggccuuaacaguacauuu

SEQ ID NO: 51402 - RNA, 21 nt, RNAi
uuaguccggaauugucaugua

SEQ ID NO: 51403 - DNA, 21 bp, homo sapiens
taacagtacatgacaatttgg

SEQ ID NO: 51404 - RNA, 21 nt, RNAi
acaguacaugacaauuugguu

SEQ ID NO: 51405 - RNA, 21 nt, RNAi
uuugucauguacuguuaaacc

SEQ ID NO: 51406 - DNA, 21 bp, homo sapiens
tacatgacaatttggctatga

SEQ ID NO: 51407 - RNA, 21 nt, RNAi
caugacaauuuggcuaugauu

SEQ ID NO: 51408 - RNA, 21 nt, RNAi
uuguacuguuaaaccgauacu

SEQ ID NO: 51409 - DNA, 21 bp, homo sapiens
taacaagtccgtgctcgccag

SEQ ID NO: 51410 - RNA, 21 nt, RNAi
acaaguccgugcucgccaguu

SEQ ID NO: 51411 - RNA, 21 nt, RNAi
uuuguucaggcacgagcgguc

SEQ ID NO: 51412 - DNA, 21 bp, homo sapiens
tagaactcagtagccatcttg

SEQ ID NO: 51413 - RNA, 21 nt, RNAi
gaacucaguagccaucuuguu

SEQ ID NO: 51414 - RNA, 21 nt, RNAi
uucuugagucaucgguagaac

SEQ ID NO: 51415 - DNA, 21 bp, homo sapiens
tattgaatgagattctggagc

SEQ ID NO: 51416 - RNA, 21 nt, RNAi
uugaaugagauucuggagcuu

SEQ ID NO: 51417 - RNA, 21 nt, RNAi
uuaacuuacucuaagaccucg

SEQ ID NO: 51418 - DNA, 21 bp, homo sapiens
taggacatgtctgagagcttt

SEQ ID NO: 51419 - RNA, 21 nt, RNAi
ggacaugucugagagcuuuuu

SEQ ID NO: 51420 - RNA, 21 nt, RNAi
uuccuguacagacucucgaaa

SEQ ID NO: 51421 - DNA, 21 bp, homo sapiens
taaagaatttggtgaccaagc

SEQ ID NO: 51422 - RNA, 21 nt, RNAi
aagaauuuggugaccaagcuu

SEQ ID NO: 51423 - RNA, 21 nt, RNAi
uuuucuuaaaccacugguucg

SEQ ID NO: 51424 - DNA, 21 bp, homo sapiens
tactcagctaaagactaacag

SEQ ID NO: 51425 - RNA, 21 nt, RNAi
cucagcuaaagacuaacaguu

SEQ ID NO: 51426 - RNA, 21 nt, RNAi
uugagucgauuucugauuguc

SEQ ID NO: 51427 - DNA, 21 bp, homo sapiens
taaagactaacagaggacaga

SEQ ID NO: 51428 - RNA, 21 nt, RNAi
aagacuaacagaggacagauu

SEQ ID NO: 51429 - RNA, 21 nt, RNAi
uuuucugauugucuccugucu

SEQ ID NO: 51430 - DNA, 21 bp, homo sapiens
taggacgaacaggaggtgtca

SEQ ID NO: 51431 - RNA, 21 nt, RNAi
ggacgaacaggaggugucauu

SEQ ID NO: 51432 - RNA, 21 nt, RNAi
uuccugcuuguccuccacagu

SEQ ID NO: 51433 - DNA, 21 bp, homo sapiens
  misc_feature (13)..(13): n is a, c, g, or t
taagttaggaaanacgatgga

SEQ ID NO: 51434 - RNA, 21 nt, RNAi
  misc_feature (11)..(11): n is a, c, g, or u
aguuaggaaanacgauggauu

SEQ ID NO: 51435 - RNA, 20 nt, RNAi
uuucaauccuuuugcuaccu

SEQ ID NO: 51436 - DNA, 21 bp, homo sapiens
  misc_feature (8)..(8): n is a, c, g, or t
  misc_feature (19)..(19): n is a, c, g, or t
taggaaanacgatggaggngg

SEQ ID NO: 51437 - RNA, 21 nt, RNAi
  misc_feature (6)..(6): n is a, c, g, or u
  misc_feature (17)..(17): n is a, c, g, or u
ggaaanacgauggaggngguu

SEQ ID NO: 51438 - RNA, 19 nt, RNAi
uuccuuuugcuaccucccc

SEQ ID NO: 51439 - DNA, 21 bp, homo sapiens
aatgcagtgagatttagagtg

SEQ ID NO: 51440 - RNA, 21 nt, RNAi
ugcagugagauuuagaguguu

SEQ ID NO: 51441 - RNA, 21 nt, RNAi
uuacgucacucuaaaucucac

SEQ ID NO: 51442 - DNA, 21 bp, homo sapiens
aacaaggtcttaatgacagat

SEQ ID NO: 51443 - RNA, 21 nt, RNAi
caaggucuuaaugacagauuu

SEQ ID NO: 51444 - RNA, 21 nt, RNAi
uuguuccagaauuacugucua

SEQ ID NO: 51445 - DNA, 21 bp, homo sapiens
aaggtcttaatgacagatcag

SEQ ID NO: 51446 - RNA, 21 nt, RNAi
ggucuuaaugacagaucaguu

SEQ ID NO: 51447 - RNA, 21 nt, RNAi
uuccagaauuacugucuaguc

SEQ ID NO: 51448 - DNA, 21 bp, homo sapiens
aaacaagctatgcagaagcat

SEQ ID NO: 51449 - RNA, 21 nt, RNAi
acaagcuaugcagaagcauuu

SEQ ID NO: 51450 - RNA, 21 nt, RNAi
uuuguucgauacgucuucgua

SEQ ID NO: 51451 - DNA, 21 bp, homo sapiens
aacaagctatgcagaagcatc

SEQ ID NO: 51452 - RNA, 21 nt, RNAi
caagcuaugcagaagcaucuu

SEQ ID NO: 51453 - RNA, 21 nt, RNAi
uuguucgauacgucuucguag

SEQ ID NO: 51454 - DNA, 21 bp, homo sapiens
aagcatcttcttcaaggctgg

SEQ ID NO: 51455 - RNA, 21 nt, RNAi
gcaucuucuucaaggcugguu

SEQ ID NO: 51456 - RNA, 21 nt, RNAi
uucguagaagaaguuccgacc

SEQ ID NO: 51457 - DNA, 21 bp, homo sapiens
aaagactactccacatcatta

SEQ ID NO: 51458 - RNA, 21 nt, RNAi
agacuacuccacaucauuauu

SEQ ID NO: 51459 - RNA, 21 nt, RNAi
uuucugaugagguguaguaau

SEQ ID NO: 51460 - DNA, 21 bp, homo sapiens
aagactactccacatcattat

SEQ ID NO: 51461 - RNA, 21 nt, RNAi
gacuacuccacaucauuauuu

SEQ ID NO: 51462 - RNA, 21 nt, RNAi
uucugaugagguguaguaaua

SEQ ID NO: 51463 - DNA, 21 bp, homo sapiens
aaagaactcaagatggctgaa

SEQ ID NO: 51464 - RNA, 21 nt, RNAi
agaacucaagauggcugaauu

SEQ ID NO: 51465 - RNA, 21 nt, RNAi
uuucuugaguucuaccgacuu

SEQ ID NO: 51466 - DNA, 21 bp, homo sapiens
aagaactcaagatggctgaaa

SEQ ID NO: 51467 - RNA, 21 nt, RNAi
gaacucaagauggcugaaauu

SEQ ID NO: 51468 - RNA, 21 nt, RNAi
uucuugaguucuaccgacuuu

SEQ ID NO: 51469 - DNA, 21 bp, homo sapiens
aaagttaagcttatcgaagcc

SEQ ID NO: 51470 - RNA, 21 nt, RNAi
aguuaagcuuaucgaagccuu

SEQ ID NO: 51471 - RNA, 21 nt, RNAi
uuucaauucgaauagcuucgg

SEQ ID NO: 51472 - DNA, 21 bp, homo sapiens
aagttaagcttatcgaagcca

SEQ ID NO: 51473 - RNA, 21 nt, RNAi
guuaagcuuaucgaagccauu

SEQ ID NO: 51474 - RNA, 21 nt, RNAi
uucaauucgaauagcuucggu

SEQ ID NO: 51475 - DNA, 21 bp, homo sapiens
aagcttatcgaagccaaagaa

SEQ ID NO: 51476 - RNA, 21 nt, RNAi
gcuuaucgaagccaaagaauu

SEQ ID NO: 51477 - RNA, 21 nt, RNAi
uucgaauagcuucgguuucuu

SEQ ID NO: 51478 - DNA, 21 bp, homo sapiens
aagcattagaagatgccagaa

SEQ ID NO: 51479 - RNA, 21 nt, RNAi
gcauuagaagaugccagaauu

SEQ ID NO: 51480 - RNA, 21 nt, RNAi
uucguaaucuucuacggucuu

SEQ ID NO: 51481 - DNA, 21 bp, homo sapiens
aacaggcttaagtgcaaccat

SEQ ID NO: 51482 - RNA, 21 nt, RNAi
caggcuuaagugcaaccauuu

SEQ ID NO: 51483 - RNA, 21 nt, RNAi
uuguccgaauucacguuggua

SEQ ID NO: 51484 - DNA, 21 bp, homo sapiens
aatggaatcatcgaatctttg

SEQ ID NO: 51485 - RNA, 21 nt, RNAi
uggaaucaucgaaucuuuguu

SEQ ID NO: 51486 - RNA, 21 nt, RNAi
uuaccuuaguagcuuagaaac

SEQ ID NO: 51487 - DNA, 21 bp, homo sapiens
aaggaaacacttcgtattact

SEQ ID NO: 51488 - RNA, 21 nt, RNAi
ggaaacacuucguauuacuuu

SEQ ID NO: 51489 - RNA, 21 nt, RNAi
uuccuuugugaagcauaauga

SEQ ID NO: 51490 - DNA, 21 bp, homo sapiens
aacacttcgtattactattgc

SEQ ID NO: 51491 - RNA, 21 nt, RNAi
cacuucguauuacuauugcuu

SEQ ID NO: 51492 - RNA, 21 nt, RNAi
uugugaagcauaaugauaacg

SEQ ID NO: 51493 - DNA, 21 bp, homo sapiens
aaaggcaatctttgaccaact

SEQ ID NO: 51494 - RNA, 21 nt, RNAi
aggcaaucuuugaccaacuuu

SEQ ID NO: 51495 - RNA, 21 nt, RNAi
uuuccguuagaaacugguuga

SEQ ID NO: 51496 - DNA, 21 bp, homo sapiens
aaggcaatctttgaccaactg

SEQ ID NO: 51497 - RNA, 21 nt, RNAi
ggcaaucuuugaccaacuguu

SEQ ID NO: 51498 - RNA, 21 nt, RNAi
uuccguuagaaacugguugac

SEQ ID NO: 51499 - DNA, 21 bp, homo sapiens
aagaggatgttcaacttcgac

SEQ ID NO: 51500 - RNA, 21 nt, RNAi
gaggauguucaacuucgacuu

SEQ ID NO: 51501 - RNA, 21 nt, RNAi
uucuccuacaaguugaagcug

SEQ ID NO: 51502 - DNA, 21 bp, homo sapiens
aagattatcaggccttaacag

SEQ ID NO: 51503 - RNA, 21 nt, RNAi
gauuaucaggccuuaacaguu

SEQ ID NO: 51504 - RNA, 21 nt, RNAi
uucuaauaguccggaauuguc

SEQ ID NO: 51505 - DNA, 21 bp, homo sapiens
aatgagatcttaacaagtccg

SEQ ID NO: 51506 - RNA, 21 nt, RNAi
ugagaucuuaacaaguccguu

SEQ ID NO: 51507 - RNA, 21 nt, RNAi
uuacucuagaauuguucaggc

SEQ ID NO: 51508 - DNA, 21 bp, homo sapiens
aaagatcttctggttctattg

SEQ ID NO: 51509 - RNA, 21 nt, RNAi
agaucuucugguucuauuguu

SEQ ID NO: 51510 - RNA, 21 nt, RNAi
uuucuagaagaccaagauaac

SEQ ID NO: 51511 - DNA, 21 bp, homo sapiens
aagatcttctggttctattga

SEQ ID NO: 51512 - RNA, 21 nt, RNAi
gaucuucugguucuauugauu

SEQ ID NO: 51513 - RNA, 21 nt, RNAi
uucuagaagaccaagauaacu

SEQ ID NO: 51514 - DNA, 21 bp, homo sapiens
aaagataggacatgtctgaga

SEQ ID NO: 51515 - RNA, 21 nt, RNAi
agauaggacaugucugagauu

SEQ ID NO: 51516 - RNA, 21 nt, RNAi
uuucuauccuguacagacucu

SEQ ID NO: 51517 - DNA, 21 bp, homo sapiens
aagaagtatatatgactccac

SEQ ID NO: 51518 - RNA, 21 nt, RNAi
gaaguauauaugacuccacuu

SEQ ID NO: 51519 - RNA, 21 nt, RNAi
uucuucauauauacugaggug

SEQ ID NO: 51520 - DNA, 21 bp, homo sapiens
aagtatatatgactccactca

SEQ ID NO: 51521 - RNA, 21 nt, RNAi
guauauaugacuccacucauu

SEQ ID NO: 51522 - RNA, 21 nt, RNAi
uucauauauacugaggugagu

SEQ ID NO: 51523 - DNA, 21 bp, homo sapiens
aagcatcaaagtctactcagc

SEQ ID NO: 51524 - RNA, 21 nt, RNAi
gcaucaaagucuacucagcuu

SEQ ID NO: 51525 - RNA, 21 nt, RNAi
uucguaguuucagaugagucg

SEQ ID NO: 51526 - DNA, 21 bp, homo sapiens
cagtgagatttagagtgtgcc

SEQ ID NO: 51527 - RNA, 21 nt, RNAi
gugagauuuagagugugccuu

SEQ ID NO: 51528 - RNA, 21 nt, RNAi
uucacucuaaaucucacacgg

SEQ ID NO: 51529 - DNA, 21 bp, homo sapiens
caacaaggtcttaatgacaga

SEQ ID NO: 51530 - RNA, 21 nt, RNAi
acaaggucuuaaugacagauu

SEQ ID NO: 51531 - RNA, 21 nt, RNAi
uuuguuccagaauuacugucu

SEQ ID NO: 51532 - DNA, 21 bp, homo sapiens
caaggtcttaatgacagatca

SEQ ID NO: 51533 - RNA, 21 nt, RNAi
aggucuuaaugacagaucauu

SEQ ID NO: 51534 - RNA, 21 nt, RNAi
uuuccagaauuacugucuagu

SEQ ID NO: 51535 - DNA, 21 bp, homo sapiens
cagagcctgtagtatatgcag

SEQ ID NO: 51536 - RNA, 21 nt, RNAi
gagccuguaguauaugcaguu

SEQ ID NO: 51537 - RNA, 21 nt, RNAi
uucucggacaucauauacguc

SEQ ID NO: 51538 - DNA, 21 bp, homo sapiens
cagagcattccagttgttaat

SEQ ID NO: 51539 - RNA, 21 nt, RNAi
gagcauuccaguuguuaauuu

SEQ ID NO: 51540 - RNA, 21 nt, RNAi
uucucguaaggucaacaauua

SEQ ID NO: 51541 - DNA, 21 bp, homo sapiens
catttcaacaggcttaagtgc

SEQ ID NO: 51542 - RNA, 21 nt, RNAi
uuucaacaggcuuaagugcuu

SEQ ID NO: 51543 - RNA, 21 nt, RNAi
uuaaaguuguccgaauucacg

SEQ ID NO: 51544 - DNA, 21 bp, homo sapiens
caacaggcttaagtgcaacca

SEQ ID NO: 51545 - RNA, 21 nt, RNAi
acaggcuuaagugcaaccauu

SEQ ID NO: 51546 - RNA, 21 nt, RNAi
uuuguccgaauucacguuggu

SEQ ID NO: 51547 - DNA, 21 bp, homo sapiens
caggcttaagtgcaaccatca

SEQ ID NO: 51548 - RNA, 21 nt, RNAi
ggcuuaagugcaaccaucauu

SEQ ID NO: 51549 - RNA, 21 nt, RNAi
uuccgaauucacguugguagu

SEQ ID NO: 51550 - DNA, 21 bp, homo sapiens
caaggaaacacttcgtattac

SEQ ID NO: 51551 - RNA, 21 nt, RNAi
aggaaacacuucguauuacuu

SEQ ID NO: 51552 - RNA, 21 nt, RNAi
uuuccuuugugaagcauaaug

SEQ ID NO: 51553 - DNA, 21 bp, homo sapiens
cacttcgtattactattgcag

SEQ ID NO: 51554 - RNA, 21 nt, RNAi
cuucguauuacuauugcaguu

SEQ ID NO: 51555 - RNA, 21 nt, RNAi
uugaagcauaaugauaacguc

SEQ ID NO: 51556 - DNA, 21 bp, homo sapiens
cagaaggactagccaagctga

SEQ ID NO: 51557 - RNA, 21 nt, RNAi
gaaggacuagccaagcugauu

SEQ ID NO: 51558 - RNA, 21 nt, RNAi
uucuuccugaucgguucgacu

SEQ ID NO: 51559 - DNA, 21 bp, homo sapiens
caacttcgacattgcctaggc

SEQ ID NO: 51560 - RNA, 21 nt, RNAi
acuucgacauugccuaggcuu

SEQ ID NO: 51561 - RNA, 21 nt, RNAi
uuugaagcuguaacggauccg

SEQ ID NO: 51562 - DNA, 21 bp, homo sapiens
cattgcctaggcgtgttcttc

SEQ ID NO: 51563 - RNA, 21 nt, RNAi
uugccuaggcguguucuucuu

SEQ ID NO: 51564 - RNA, 21 nt, RNAi
uuaacggauccgcacaagaag

SEQ ID NO: 51565 - DNA, 21 bp, homo sapiens
caagcaggactaatcaggaat

SEQ ID NO: 51566 - RNA, 21 nt, RNAi
agcaggacuaaucaggaauuu

SEQ ID NO: 51567 - RNA, 21 nt, RNAi
uuucguccugauuaguccuua

SEQ ID NO: 51568 - DNA, 21 bp, homo sapiens
cacaaatgttgctgagttact

SEQ ID NO: 51569 - RNA, 21 nt, RNAi
caaauguugcugaguuacuuu

SEQ ID NO: 51570 - RNA, 21 nt, RNAi
uuguuuacaacgacucaauga

SEQ ID NO: 51571 - DNA, 21 bp, homo sapiens
caaatgttgctgagttacttg

SEQ ID NO: 51572 - RNA, 21 nt, RNAi
aauguugcugaguuacuuguu

SEQ ID NO: 51573 - RNA, 21 nt, RNAi
uuuuacaacgacucaaugaac

SEQ ID NO: 51574 - DNA, 21 bp, homo sapiens
caagaccaagtggattaaatc

SEQ ID NO: 51575 - RNA, 21 nt, RNAi
agaccaaguggauuaaaucuu

SEQ ID NO: 51576 - RNA, 21 nt, RNAi
uuucugguucaccuaauuuag

SEQ ID NO: 51577 - DNA, 21 bp, homo sapiens
cagtacatgacaatttggcta

SEQ ID NO: 51578 - RNA, 21 nt, RNAi
guacaugacaauuuggcuauu

SEQ ID NO: 51579 - RNA, 21 nt, RNAi
uucauguacuguuaaaccgau

SEQ ID NO: 51580 - DNA, 21 bp, homo sapiens
caatgagatcttaacaagtcc

SEQ ID NO: 51581 - RNA, 21 nt, RNAi
augagaucuuaacaaguccuu

SEQ ID NO: 51582 - RNA, 21 nt, RNAi
uuuacucuagaauuguucagg

SEQ ID NO: 51583 - DNA, 21 bp, homo sapiens
caagcatcaaagtctactcag

SEQ ID NO: 51584 - RNA, 21 nt, RNAi
agcaucaaagucuacucaguu

SEQ ID NO: 51585 - RNA, 21 nt, RNAi
uuucguaguuucagaugaguc

SEQ ID NO: 51586 - DNA, 21 bp, homo sapiens
cagctaaagactaacagagga

SEQ ID NO: 51587 - RNA, 21 nt, RNAi
gcuaaagacuaacagaggauu

SEQ ID NO: 51588 - RNA, 21 nt, RNAi
uucgauuucugauugucuccu

SEQ ID NO: 51589 - DNA, 21 bp, homo sapiens
cagtttcagctaggacgaaca

SEQ ID NO: 51590 - RNA, 21 nt, RNAi
guuucagcuaggacgaacauu

SEQ ID NO: 51591 - RNA, 21 nt, RNAi
uucaaagucgauccugcuugu

SEQ ID NO: 51592 - DNA, 21 bp, homo sapiens
gaaagctggcttatcaggttt

SEQ ID NO: 51593 - RNA, 21 nt, RNAi
aagcuggcuuaucagguuuuu

SEQ ID NO: 51594 - RNA, 21 nt, RNAi
uuuucgaccgaauaguccaaa

SEQ ID NO: 51595 - DNA, 21 bp, homo sapiens
gagttgctccatcggttggat

SEQ ID NO: 51596 - RNA, 21 nt, RNAi
guugcuccaucgguuggauuu

SEQ ID NO: 51597 - RNA, 21 nt, RNAi
uucaacgagguagccaaccua

SEQ ID NO: 51598 - DNA, 21 bp, homo sapiens
gatggcaggaaattgattcca

SEQ ID NO: 51599 - RNA, 21 nt, RNAi
uggcaggaaauugauuccauu

SEQ ID NO: 51600 - RNA, 21 nt, RNAi
uuaccguccuuuaacuaaggu

SEQ ID NO: 51601 - DNA, 21 bp, homo sapiens
gagcctgtagtatatgcagac

SEQ ID NO: 51602 - RNA, 21 nt, RNAi
gccuguaguauaugcagacuu

SEQ ID NO: 51603 - RNA, 21 nt, RNAi
uucggacaucauauacgucug

SEQ ID NO: 51604 - DNA, 21 bp, homo sapiens
gagcattccagttgttaatga

SEQ ID NO: 51605 - RNA, 21 nt, RNAi
gcauuccaguuguuaaugauu

SEQ ID NO: 51606 - RNA, 21 nt, RNAi
uucguaaggucaacaauuacu

SEQ ID NO: 51607 - DNA, 21 bp, homo sapiens
gactactccacatcattatag

SEQ ID NO: 51608 - RNA, 21 nt, RNAi
cuacuccacaucauuauaguu

SEQ ID NO: 51609 - RNA, 21 nt, RNAi
uugaugagguguaguaauauc

SEQ ID NO: 51610 - DNA, 21 bp, homo sapiens
gaaagaactcaagatggctga

SEQ ID NO: 51611 - RNA, 21 nt, RNAi
aagaacucaagauggcugauu

SEQ ID NO: 51612 - RNA, 21 nt, RNAi
uuuucuugaguucuaccgacu

SEQ ID NO: 51613 - DNA, 21 bp, homo sapiens
gaactcaagatggctgaaata

SEQ ID NO: 51614 - RNA, 21 nt, RNAi
acucaagauggcugaaauauu

SEQ ID NO: 51615 - RNA, 21 nt, RNAi
uuugaguucuaccgacuuuau

SEQ ID NO: 51616 - DNA, 21 bp, homo sapiens
gatgtccatttcaacaggctt

SEQ ID NO: 51617 - RNA, 21 nt, RNAi
uguccauuucaacaggcuuuu

SEQ ID NO: 51618 - RNA, 21 nt, RNAi
uuacagguaaaguuguccgaa

SEQ ID NO: 51619 - DNA, 21 bp, homo sapiens
gacattgcctaggcgtgttct

SEQ ID NO: 51620 - RNA, 21 nt, RNAi
cauugccuaggcguguucuuu

SEQ ID NO: 51621 - RNA, 21 nt, RNAi
uuguaacggauccgcacaaga

SEQ ID NO: 51622 - DNA, 21 bp, homo sapiens
gactaatcaggaatgctttga

SEQ ID NO: 51623 - RNA, 21 nt, RNAi
cuaaucaggaaugcuuugauu

SEQ ID NO: 51624 - RNA, 21 nt, RNAi
uugauuaguccuuacgaaacu

SEQ ID NO: 51625 - DNA, 21 bp, homo sapiens
gatatcacaaatgttgctgag

SEQ ID NO: 51626 - RNA, 21 nt, RNAi
uaucacaaauguugcugaguu

SEQ ID NO: 51627 - RNA, 21 nt, RNAi
uuauaguguuuacaacgacuc

SEQ ID NO: 51628 - DNA, 21 bp, homo sapiens
gacaagaccaagtggattaaa

SEQ ID NO: 51629 - RNA, 21 nt, RNAi
caagaccaaguggauuaaauu

SEQ ID NO: 51630 - RNA, 21 nt, RNAi
uuguucugguucaccuaauuu

SEQ ID NO: 51631 - DNA, 21 bp, homo sapiens
gattatcaggccttaacagta

SEQ ID NO: 51632 - RNA, 21 nt, RNAi
uuaucaggccuuaacaguauu

SEQ ID NO: 51633 - RNA, 21 nt, RNAi
uuaauaguccggaauugucau

SEQ ID NO: 51634 - DNA, 21 bp, homo sapiens
gagatcttaacaagtccgtgc

SEQ ID NO: 51635 - RNA, 21 nt, RNAi
gaucuuaacaaguccgugcuu

SEQ ID NO: 51636 - RNA, 21 nt, RNAi
uucuagaauuguucaggcacg

SEQ ID NO: 51637 - DNA, 21 bp, homo sapiens
gatcttaacaagtccgtgctc

SEQ ID NO: 51638 - RNA, 21 nt, RNAi
ucuuaacaaguccgugcucuu

SEQ ID NO: 51639 - RNA, 21 nt, RNAi
uuagaauuguucaggcacgag

SEQ ID NO: 51640 - DNA, 21 bp, homo sapiens
gatgccaccttgactacaact

SEQ ID NO: 51641 - RNA, 21 nt, RNAi
ugccaccuugacuacaacuuu

SEQ ID NO: 51642 - RNA, 21 nt, RNAi
uuacgguggaacugauguuga

SEQ ID NO: 51643 - DNA, 21 bp, homo sapiens
gaagtatatatgactccactc

SEQ ID NO: 51644 - RNA, 21 nt, RNAi
aguauauaugacuccacucuu

SEQ ID NO: 51645 - RNA, 21 nt, RNAi
uuucauauauacugaggugag

SEQ ID NO: 51646 - DNA, 21 bp, homo sapiens
gacagtttcagctaggacgaa

SEQ ID NO: 51647 - RNA, 21 nt, RNAi
caguuucagcuaggacgaauu

SEQ ID NO: 51648 - RNA, 21 nt, RNAi
uugucaaagucgauccugcuu

SEQ ID NO: 51649 - DNA, 21 bp, homo sapiens
gaagccgactctgaaagtgat

SEQ ID NO: 51650 - RNA, 21 nt, RNAi
agccgacucugaaagugauuu

SEQ ID NO: 51651 - RNA, 21 nt, RNAi
uuucggcugagacuuucacua

SEQ ID NO: 51652 - DNA, 21 bp, homo sapiens
taccgcacgatggatgataag

SEQ ID NO: 51653 - RNA, 21 nt, RNAi
ccgcacgauggaugauaaguu

SEQ ID NO: 51654 - RNA, 21 nt, RNAi
uuggcgugcuaccuacuauuc

SEQ ID NO: 51655 - DNA, 21 bp, homo sapiens
tatggtggtctataaacgtga

SEQ ID NO: 51656 - RNA, 21 nt, RNAi
ugguggucuauaaacgugauu

SEQ ID NO: 51657 - RNA, 21 nt, RNAi
uuaccaccagauauuugcacu

SEQ ID NO: 51658 - DNA, 21 bp, homo sapiens
tataaacgtgaaccagctgtg

SEQ ID NO: 51659 - RNA, 21 nt, RNAi
uaaacgugaaccagcuguguu

SEQ ID NO: 51660 - RNA, 21 nt, RNAi
uuauuugcacuuggucgacac

SEQ ID NO: 51661 - DNA, 21 bp, homo sapiens
tatcttagagttgctccatcg

SEQ ID NO: 51662 - RNA, 21 nt, RNAi
ucuuagaguugcuccaucguu

SEQ ID NO: 51663 - RNA, 21 nt, RNAi
uuagaaucucaacgagguagc

SEQ ID NO: 51664 - DNA, 21 bp, homo sapiens
tattaagtctttggataccag

SEQ ID NO: 51665 - RNA, 21 nt, RNAi
uuaagucuuuggauaccaguu

SEQ ID NO: 51666 - RNA, 21 nt, RNAi
uuaauucagaaaccuaugguc

SEQ ID NO: 51667 - DNA, 21 bp, homo sapiens
tactccacatcattatagatg

SEQ ID NO: 51668 - RNA, 21 nt, RNAi
cuccacaucauuauagauguu

SEQ ID NO: 51669 - RNA, 21 nt, RNAi
uugagguguaguaauaucuac

SEQ ID NO: 51670 - DNA, 21 bp, homo sapiens
taagcttatcgaagccaaaga

SEQ ID NO: 51671 - RNA, 21 nt, RNAi
agcuuaucgaagccaaagauu

SEQ ID NO: 51672 - RNA, 21 nt, RNAi
uuucgaauagcuucgguuucu

SEQ ID NO: 51673 - DNA, 21 bp, homo sapiens
taaaggcaatctttgaccaac

SEQ ID NO: 51674 - RNA, 21 nt, RNAi
aaggcaaucuuugaccaacuu

SEQ ID NO: 51675 - RNA, 21 nt, RNAi
uuuuccguuagaaacugguug

SEQ ID NO: 51676 - DNA, 21 bp, homo sapiens
tatctgaacttaggactggag

SEQ ID NO: 51677 - RNA, 21 nt, RNAi
ucugaacuuaggacuggaguu

SEQ ID NO: 51678 - RNA, 21 nt, RNAi
uuagacuugaauccugaccuc

SEQ ID NO: 51679 - DNA, 21 bp, homo sapiens
tatggtacaatcctgtgactg

SEQ ID NO: 51680 - RNA, 21 nt, RNAi
ugguacaauccugugacuguu

SEQ ID NO: 51681 - RNA, 21 nt, RNAi
uuaccauguuaggacacugac

SEQ ID NO: 51682 - DNA, 21 bp, homo sapiens
tatgcaagcaggactaatcag

SEQ ID NO: 51683 - RNA, 21 nt, RNAi
ugcaagcaggacuaaucaguu

SEQ ID NO: 51684 - RNA, 21 nt, RNAi
uuacguucguccugauuaguc

SEQ ID NO: 51685 - DNA, 21 bp, homo sapiens
tatcacaaatgttgctgagtt

SEQ ID NO: 51686 - RNA, 21 nt, RNAi
ucacaaauguugcugaguuuu

SEQ ID NO: 51687 - RNA, 21 nt, RNAi
uuaguguuuacaacgacucaa

SEQ ID NO: 51688 - DNA, 21 bp, homo sapiens
tatcaggccttaacagtacat

SEQ ID NO: 51689 - RNA, 21 nt, RNAi
ucaggccuuaacaguacauuu

SEQ ID NO: 51690 - RNA, 21 nt, RNAi
uuaguccggaauugucaugua

SEQ ID NO: 51691 - DNA, 21 bp, homo sapiens
tacatgacaatttggctatga

SEQ ID NO: 51692 - RNA, 21 nt, RNAi
caugacaauuuggcuaugauu

SEQ ID NO: 51693 - RNA, 21 nt, RNAi
uuguacuguuaaaccgauacu

SEQ ID NO: 51694 - DNA, 21 bp, homo sapiens
tattgaatgagattctggagc

SEQ ID NO: 51695 - RNA, 21 nt, RNAi
uugaaugagauucuggagcuu

SEQ ID NO: 51696 - RNA, 21 nt, RNAi
uuaacuuacucuaagaccucg

SEQ ID NO: 51697 - DNA, 21 bp, homo sapiens
tactcagctaaagactaacag

SEQ ID NO: 51698 - RNA, 21 nt, RNAi
cucagcuaaagacuaacaguu

SEQ ID NO: 51699 - RNA, 21 nt, RNAi
uugagucgauuucugauuguc

SEQ ID NO: 51700 - DNA, 21 bp, homo sapiens
aacagctgtggaagtcggagt

SEQ ID NO: 51701 - RNA, 21 nt, RNAi
cagcuguggaagucggaguuu

SEQ ID NO: 51702 - RNA, 21 nt, RNAi
uugucgacaccuucagccuca

SEQ ID NO: 51703 - DNA, 21 bp, homo sapiens
aagcaaggcctggtctccaag

SEQ ID NO: 51704 - RNA, 21 nt, RNAi
gcaaggccuggucuccaaguu

SEQ ID NO: 51705 - RNA, 21 nt, RNAi
uucguuccggaccagagguuc

SEQ ID NO: 51706 - DNA, 21 bp, homo sapiens
aaggcctggtctccaagtcct

SEQ ID NO: 51707 - RNA, 21 nt, RNAi
ggccuggucuccaaguccuuu

SEQ ID NO: 51708 - RNA, 21 nt, RNAi
uuccggaccagagguucagga

SEQ ID NO: 51709 - DNA, 21 bp, homo sapiens
aagtcctctcctaagaagcct

SEQ ID NO: 51710 - RNA, 21 nt, RNAi
guccucuccuaagaagccuuu

SEQ ID NO: 51711 - RNA, 21 nt, RNAi
uucaggagaggauucuucgga

SEQ ID NO: 51712 - DNA, 21 bp, homo sapiens
aagaagcctcgtggacgtaac

SEQ ID NO: 51713 - RNA, 21 nt, RNAi
gaagccucguggacguaacuu

SEQ ID NO: 51714 - RNA, 21 nt, RNAi
uucuucggagcaccugcauug

SEQ ID NO: 51715 - DNA, 21 bp, homo sapiens
aagcctcgtggacgtaacatc

SEQ ID NO: 51716 - RNA, 21 nt, RNAi
gccucguggacguaacaucuu

SEQ ID NO: 51717 - RNA, 21 nt, RNAi
uucggagcaccugcauuguag

SEQ ID NO: 51718 - DNA, 21 bp, homo sapiens
aagttcctccactgagctcgc

SEQ ID NO: 51719 - RNA, 21 nt, RNAi
guuccuccacugagcucgcuu

SEQ ID NO: 51720 - RNA, 21 nt, RNAi
uucaaggaggugacucgagcg

SEQ ID NO: 51721 - DNA, 21 bp, homo sapiens
aaggaggaagcaaacaccatt

SEQ ID NO: 51722 - RNA, 21 nt, RNAi
ggaggaagcaaacaccauuuu

SEQ ID NO: 51723 - RNA, 21 nt, RNAi
uuccuccuucguuugugguaa

SEQ ID NO: 51724 - DNA, 21 bp, homo sapiens
aagcaaacaccattgctaagt

SEQ ID NO: 51725 - RNA, 21 nt, RNAi
gcaaacaccauugcuaaguuu

SEQ ID NO: 51726 - RNA, 21 nt, RNAi
uucguuugugguaacgauuca

SEQ ID NO: 51727 - DNA, 21 bp, homo sapiens
aaacaccattgctaagtcgga

SEQ ID NO: 51728 - RNA, 21 nt, RNAi
acaccauugcuaagucggauu

SEQ ID NO: 51729 - RNA, 21 nt, RNAi
uuugugguaacgauucagccu

SEQ ID NO: 51730 - DNA, 21 bp, homo sapiens
aacaccattgctaagtcggat

SEQ ID NO: 51731 - RNA, 21 nt, RNAi
caccauugcuaagucggauuu

SEQ ID NO: 51732 - RNA, 21 nt, RNAi
uugugguaacgauucagccua

SEQ ID NO: 51733 - DNA, 21 bp, homo sapiens
aagtcggatctgctccagtgt

SEQ ID NO: 51734 - RNA, 21 nt, RNAi
gucggaucugcuccaguguuu

SEQ ID NO: 51735 - RNA, 21 nt, RNAi
uucagccuagacgaggucaca

SEQ ID NO: 51736 - DNA, 21 bp, homo sapiens
aagatcaaggaaggatctgtg

SEQ ID NO: 51737 - RNA, 21 nt, RNAi
gaucaaggaaggaucuguguu

SEQ ID NO: 51738 - RNA, 21 nt, RNAi
uucuaguuccuuccuagacac

SEQ ID NO: 51739 - DNA, 21 bp, homo sapiens
aaggaaggatctgtgtggtca

SEQ ID NO: 51740 - RNA, 21 nt, RNAi
ggaaggaucuguguggucauu

SEQ ID NO: 51741 - RNA, 21 nt, RNAi
uuccuuccuagacacaccagu

SEQ ID NO: 51742 - DNA, 21 bp, homo sapiens
aaggatctgtgtggtcattga

SEQ ID NO: 51743 - RNA, 21 nt, RNAi
ggaucuguguggucauugauu

SEQ ID NO: 51744 - RNA, 21 nt, RNAi
uuccuagacacaccaguaacu

SEQ ID NO: 51745 - DNA, 21 bp, homo sapiens
aagccaatcaacaatgctgac

SEQ ID NO: 51746 - RNA, 21 nt, RNAi
gccaaucaacaaugcugacuu

SEQ ID NO: 51747 - RNA, 21 nt, RNAi
uucgguuaguuguuacgacug

SEQ ID NO: 51748 - DNA, 21 bp, homo sapiens
aatcaacaatgctgacttcat

SEQ ID NO: 51749 - RNA, 21 nt, RNAi
ucaacaaugcugacuucauuu

SEQ ID NO: 51750 - RNA, 21 nt, RNAi
uuaguuguuacgacugaagua

SEQ ID NO: 51751 - DNA, 21 bp, homo sapiens
aacaatgctgacttcatagtg

SEQ ID NO: 51752 - RNA, 21 nt, RNAi
caaugcugacuucauaguguu

SEQ ID NO: 51753 - RNA, 21 nt, RNAi
uuguuacgacugaaguaucac

SEQ ID NO: 51754 - DNA, 21 bp, homo sapiens
aatgctgacttcatagtgcct

SEQ ID NO: 51755 - RNA, 21 nt, RNAi
ugcugacuucauagugccuuu

SEQ ID NO: 51756 - RNA, 21 nt, RNAi
uuacgacugaaguaucacgga

SEQ ID NO: 51757 - DNA, 21 bp, homo sapiens
aagaggccttatgtggatgag

SEQ ID NO: 51758 - RNA, 21 nt, RNAi
gaggccuuauguggaugaguu

SEQ ID NO: 51759 - RNA, 21 nt, RNAi
uucuccggaauacaccuacuc

SEQ ID NO: 51760 - DNA, 21 bp, homo sapiens
aactctttgaatgtgttctct

SEQ ID NO: 51761 - RNA, 21 nt, RNAi
cucuuugaauguguucucuuu

SEQ ID NO: 51762 - RNA, 21 nt, RNAi
uugagaaacuuacacaagaga

SEQ ID NO: 51763 - DNA, 21 bp, homo sapiens
aatgtgttctcttcactgcca

SEQ ID NO: 51764 - RNA, 21 nt, RNAi
uguguucucuucacugccauu

SEQ ID NO: 51765 - RNA, 21 nt, RNAi
uuacacaagagaagugacggu

SEQ ID NO: 51766 - DNA, 21 bp, homo sapiens
aactcgcctgcttcttacata

SEQ ID NO: 51767 - RNA, 21 nt, RNAi
cucgccugcuucuuacauauu

SEQ ID NO: 51768 - RNA, 21 nt, RNAi
uugagcggacgaagaauguau

SEQ ID NO: 51769 - DNA, 21 bp, homo sapiens
aatgcagtgcctgtgcagtcc

SEQ ID NO: 51770 - RNA, 21 nt, RNAi
ugcagugccugugcaguccuu

SEQ ID NO: 51771 - RNA, 21 nt, RNAi
uuacgucacggacacgucagg

SEQ ID NO: 51772 - DNA, 21 bp, homo sapiens
aatctttgaggagctgagcgg

SEQ ID NO: 51773 - RNA, 21 nt, RNAi
ucuuugaggagcugagcgguu

SEQ ID NO: 51774 - RNA, 21 nt, RNAi
uuagaaacuccucgacucgcc

SEQ ID NO: 51775 - DNA, 21 bp, homo sapiens
aagctggagtgcctcaccaca

SEQ ID NO: 51776 - RNA, 21 nt, RNAi
gcuggagugccucaccacauu

SEQ ID NO: 51777 - RNA, 21 nt, RNAi
uucgaccucacggaguggugu

SEQ ID NO: 51778 - DNA, 21 bp, homo sapiens
aagtaactggaaagagcttta

SEQ ID NO: 51779 - RNA, 21 nt, RNAi
guaacuggaaagagcuuuauu

SEQ ID NO: 51780 - RNA, 21 nt, RNAi
uucauugaccuuucucgaaau

SEQ ID NO: 51781 - DNA, 21 bp, homo sapiens
aactggaaagagctttaggac

SEQ ID NO: 51782 - RNA, 21 nt, RNAi
cuggaaagagcuuuaggacuu

SEQ ID NO: 51783 - RNA, 21 nt, RNAi
uugaccuuucucgaaauccug

SEQ ID NO: 51784 - DNA, 21 bp, homo sapiens
aaagagctttaggacagctta

SEQ ID NO: 51785 - RNA, 21 nt, RNAi
agagcuuuaggacagcuuauu

SEQ ID NO: 51786 - RNA, 21 nt, RNAi
uuucucgaaauccugucgaau

SEQ ID NO: 51787 - DNA, 21 bp, homo sapiens
aagagctttaggacagcttag

SEQ ID NO: 51788 - RNA, 21 nt, RNAi
gagcuuuaggacagcuuaguu

SEQ ID NO: 51789 - RNA, 21 nt, RNAi
uucucgaaauccugucgaauc

SEQ ID NO: 51790 - DNA, 21 bp, homo sapiens
aacttgttgagatgtgtgttt

SEQ ID NO: 51791 - RNA, 21 nt, RNAi
cuuguugagauguguguuuuu

SEQ ID NO: 51792 - RNA, 21 nt, RNAi
uugaacaacucuacacacaaa

SEQ ID NO: 51793 - DNA, 21 bp, homo sapiens
aagctgaaagaccaagactct

SEQ ID NO: 51794 - RNA, 21 nt, RNAi
gcugaaagaccaagacucuuu

SEQ ID NO: 51795 - RNA, 21 nt, RNAi
uucgacuuucugguucugaga

SEQ ID NO: 51796 - DNA, 21 bp, homo sapiens
aagttagcttgtctcctctcc

SEQ ID NO: 51797 - RNA, 21 nt, RNAi
guuagcuugucuccucuccuu

SEQ ID NO: 51798 - RNA, 21 nt, RNAi
uucaaucgaacagaggagagg

SEQ ID NO: 51799 - DNA, 21 bp, homo sapiens
aagagccactgagttgtgtag

SEQ ID NO: 51800 - RNA, 21 nt, RNAi
gagccacugaguuguguaguu

SEQ ID NO: 51801 - RNA, 21 nt, RNAi
uucucggugacucaacacauc

SEQ ID NO: 51802 - DNA, 21 bp, homo sapiens
aagactccattgccaaaccat

SEQ ID NO: 51803 - RNA, 21 nt, RNAi
gacuccauugccaaaccauuu

SEQ ID NO: 51804 - RNA, 21 nt, RNAi
uucugagguaacgguuuggua

SEQ ID NO: 51805 - DNA, 21 bp, homo sapiens
aaaccatggcctttcctcagt

SEQ ID NO: 51806 - RNA, 21 nt, RNAi
accauggccuuuccucaguuu

SEQ ID NO: 51807 - RNA, 21 nt, RNAi
uuugguaccggaaaggaguca

SEQ ID NO: 51808 - DNA, 21 bp, homo sapiens
aaccatggcctttcctcagtg

SEQ ID NO: 51809 - RNA, 21 nt, RNAi
ccauggccuuuccucaguguu

SEQ ID NO: 51810 - RNA, 21 nt, RNAi
uugguaccggaaaggagucac

SEQ ID NO: 51811 - DNA, 21 bp, homo sapiens
aaggcctatgccaaggataaa

SEQ ID NO: 51812 - RNA, 21 nt, RNAi
ggccuaugccaaggauaaauu

SEQ ID NO: 51813 - RNA, 21 nt, RNAi
uuccggauacgguuccuauuu

SEQ ID NO: 51814 - DNA, 21 bp, homo sapiens
aaatccttctccagccagctg

SEQ ID NO: 51815 - RNA, 21 nt, RNAi
auccuucuccagccagcuguu

SEQ ID NO: 51816 - RNA, 21 nt, RNAi
uuuaggaagaggucggucgac

SEQ ID NO: 51817 - DNA, 21 bp, homo sapiens
aatccttctccagccagctgc

SEQ ID NO: 51818 - RNA, 21 nt, RNAi
uccuucuccagccagcugcuu

SEQ ID NO: 51819 - RNA, 21 nt, RNAi
uuaggaagaggucggucgacg

SEQ ID NO: 51820 - DNA, 21 bp, homo sapiens
aagatgagaacttgtttccag

SEQ ID NO: 51821 - RNA, 21 nt, RNAi
gaugagaacuuguuuccaguu

SEQ ID NO: 51822 - RNA, 21 nt, RNAi
uucuacucuugaacaaagguc

SEQ ID NO: 51823 - DNA, 21 bp, homo sapiens
aacttgtttccagaccagcat

SEQ ID NO: 51824 - RNA, 21 nt, RNAi
cuuguuuccagaccagcauuu

SEQ ID NO: 51825 - RNA, 21 nt, RNAi
uugaacaaaggucuggucgua

SEQ ID NO: 51826 - DNA, 21 bp, homo sapiens
aaaggctatgcttgcctccgg

SEQ ID NO: 51827 - RNA, 21 nt, RNAi
aggcuaugcuugccuccgguu

SEQ ID NO: 51828 - RNA, 21 nt, RNAi
uuuccgauacgaacggaggcc

SEQ ID NO: 51829 - DNA, 21 bp, homo sapiens
aaggctatgcttgcctccggc

SEQ ID NO: 51830 - RNA, 21 nt, RNAi
ggcuaugcuugccuccggcuu

SEQ ID NO: 51831 - RNA, 21 nt, RNAi
uuccgauacgaacggaggccg

SEQ ID NO: 51832 - DNA, 21 bp, homo sapiens
aagaggacagataactgattt

SEQ ID NO: 51833 - RNA, 21 nt, RNAi
gaggacagauaacugauuuuu

SEQ ID NO: 51834 - RNA, 21 nt, RNAi
uucuccugucuauugacuaaa

SEQ ID NO: 51835 - DNA, 21 bp, homo sapiens
aaagacaaatcctcaaagcgt

SEQ ID NO: 51836 - RNA, 21 nt, RNAi
agacaaauccucaaagcguuu

SEQ ID NO: 51837 - RNA, 21 nt, RNAi
uuucuguuuaggaguuucgca

SEQ ID NO: 51838 - DNA, 21 bp, homo sapiens
aagacaaatcctcaaagcgtg

SEQ ID NO: 51839 - RNA, 21 nt, RNAi
gacaaauccucaaagcguguu

SEQ ID NO: 51840 - RNA, 21 nt, RNAi
uucuguuuaggaguuucgcac

SEQ ID NO: 51841 - DNA, 21 bp, homo sapiens
aaatcctcaaagcgtggacgt

SEQ ID NO: 51842 - RNA, 21 nt, RNAi
auccucaaagcguggacguuu

SEQ ID NO: 51843 - RNA, 21 nt, RNAi
uuuaggaguuucgcaccugca

SEQ ID NO: 51844 - DNA, 21 bp, homo sapiens
aatcctcaaagcgtggacgtg

SEQ ID NO: 51845 - RNA, 21 nt, RNAi
uccucaaagcguggacguguu

SEQ ID NO: 51846 - RNA, 21 nt, RNAi
uuaggaguuucgcaccugcac

SEQ ID NO: 51847 - DNA, 21 bp, homo sapiens
aaggacttctgttccaaaggc

SEQ ID NO: 51848 - RNA, 21 nt, RNAi
ggacuucuguuccaaaggcuu

SEQ ID NO: 51849 - RNA, 21 nt, RNAi
uuccugaagacaagguuuccg

SEQ ID NO: 51850 - DNA, 21 bp, homo sapiens
aatgagtgttcttgacatgtg

SEQ ID NO: 51851 - RNA, 21 nt, RNAi
ugaguguucuugacauguguu

SEQ ID NO: 51852 - RNA, 21 nt, RNAi
uuacucacaagaacuguacac

SEQ ID NO: 51853 - DNA, 21 bp, homo sapiens
aatgcgcatgctttctgcctc

SEQ ID NO: 51854 - RNA, 21 nt, RNAi
ugcgcaugcuuucugccucuu

SEQ ID NO: 51855 - RNA, 21 nt, RNAi
uuacgcguacgaaagacggag

SEQ ID NO: 51856 - DNA, 21 bp, homo sapiens
aaggttcttaatagtgaatgc

SEQ ID NO: 51857 - RNA, 21 nt, RNAi
gguucuuaauagugaaugcuu

SEQ ID NO: 51858 - RNA, 21 nt, RNAi
uuccaagaauuaucacuuacg

SEQ ID NO: 51859 - DNA, 21 bp, homo sapiens
aaagtcatcacgaaatggaag

SEQ ID NO: 51860 - RNA, 21 nt, RNAi
agucaucacgaaauggaaguu

SEQ ID NO: 51861 - RNA, 21 nt, RNAi
uuucaguagugcuuuaccuuc

SEQ ID NO: 51862 - DNA, 21 bp, homo sapiens
aagtcatcacgaaatggaagt

SEQ ID NO: 51863 - RNA, 21 nt, RNAi
gucaucacgaaauggaaguuu

SEQ ID NO: 51864 - RNA, 21 nt, RNAi
uucaguagugcuuuaccuuca

SEQ ID NO: 51865 - DNA, 21 bp, homo sapiens
aaataagaggaagtgctgctg

SEQ ID NO: 51866 - RNA, 21 nt, RNAi
auaagaggaagugcugcuguu

SEQ ID NO: 51867 - RNA, 21 nt, RNAi
uuuauucuccuucacgacgac

SEQ ID NO: 51868 - DNA, 21 bp, homo sapiens
aataagaggaagtgctgctgt

SEQ ID NO: 51869 - RNA, 21 nt, RNAi
uaagaggaagugcugcuguuu

SEQ ID NO: 51870 - RNA, 21 nt, RNAi
uuauucuccuucacgacgaca

SEQ ID NO: 51871 - DNA, 21 bp, homo sapiens
aagaggaagtgctgctgtaat

SEQ ID NO: 51872 - RNA, 21 nt, RNAi
gaggaagugcugcuguaauuu

SEQ ID NO: 51873 - RNA, 21 nt, RNAi
uucuccuucacgacgacauua

SEQ ID NO: 51874 - DNA, 21 bp, homo sapiens
aaagcaggtggtagagcagca

SEQ ID NO: 51875 - RNA, 21 nt, RNAi
agcaggugguagagcagcauu

SEQ ID NO: 51876 - RNA, 21 nt, RNAi
uuucguccaccaucucgucgu

SEQ ID NO: 51877 - DNA, 21 bp, homo sapiens
aagcaggtggtagagcagcag

SEQ ID NO: 51878 - RNA, 21 nt, RNAi
gcaggugguagagcagcaguu

SEQ ID NO: 51879 - RNA, 21 nt, RNAi
uucguccaccaucucgucguc

SEQ ID NO: 51880 - DNA, 21 bp, homo sapiens
aaggttataaggccttgtctt

SEQ ID NO: 51881 - RNA, 21 nt, RNAi
gguuauaaggccuugucuuuu

SEQ ID NO: 51882 - RNA, 21 nt, RNAi
uuccaauauuccggaacagaa

SEQ ID NO: 51883 - DNA, 21 bp, homo sapiens
aaggccttgtctttctctttg

SEQ ID NO: 51884 - RNA, 21 nt, RNAi
ggccuugucuuucucuuuguu

SEQ ID NO: 51885 - RNA, 21 nt, RNAi
uuccggaacagaaagagaaac

SEQ ID NO: 51886 - DNA, 21 bp, homo sapiens
aatcataaagtggaacagagt

SEQ ID NO: 51887 - RNA, 21 nt, RNAi
ucauaaaguggaacagaguuu

SEQ ID NO: 51888 - RNA, 21 nt, RNAi
uuaguauuucaccuugucuca

SEQ ID NO: 51889 - DNA, 21 bp, homo sapiens
aactcatgtgghcatttccga

SEQ ID NO: 51890 - RNA, 21 nt, RNAi
cucaugugghcauuuccgauu

SEQ ID NO: 51891 - RNA, 20 nt, RNAi
uugaguacaccguaaaggcu

SEQ ID NO: 51892 - DNA, 21 bp, homo sapiens
aaatatactgtctcttgaagg

SEQ ID NO: 51893 - RNA, 21 nt, RNAi
auauacugucucuugaagguu

SEQ ID NO: 51894 - RNA, 21 nt, RNAi
uuuauaugacagagaacuucc

SEQ ID NO: 51895 - DNA, 21 bp, homo sapiens
aatatactgtctcttgaagga

SEQ ID NO: 51896 - RNA, 21 nt, RNAi
uauacugucucuugaaggauu

SEQ ID NO: 51897 - RNA, 21 nt, RNAi
uuauaugacagagaacuuccu

SEQ ID NO: 51898 - DNA, 21 bp, homo sapiens
aaggaaagcaggagctcagac

SEQ ID NO: 51899 - RNA, 21 nt, RNAi
ggaaagcaggagcucagacuu

SEQ ID NO: 51900 - RNA, 21 nt, RNAi
uuccuuucguccucgagucug

SEQ ID NO: 51901 - DNA, 21 bp, homo sapiens
aaagcaggagctcagactctt

SEQ ID NO: 51902 - RNA, 21 nt, RNAi
agcaggagcucagacucuuuu

SEQ ID NO: 51903 - RNA, 21 nt, RNAi
uuucguccucgagucugagaa

SEQ ID NO: 51904 - DNA, 21 bp, homo sapiens
aagcaggagctcagactctta

SEQ ID NO: 51905 - RNA, 21 nt, RNAi
gcaggagcucagacucuuauu

SEQ ID NO: 51906 - RNA, 21 nt, RNAi
uucguccucgagucugagaau

SEQ ID NO: 51907 - DNA, 21 bp, homo sapiens
aaggcctgacctaggctgcta

SEQ ID NO: 51908 - RNA, 21 nt, RNAi
ggccugaccuaggcugcuauu

SEQ ID NO: 51909 - RNA, 21 nt, RNAi
uuccggacuggauccgacgau

SEQ ID NO: 51910 - DNA, 21 bp, homo sapiens
aaatcttgtgccgtctaggcc

SEQ ID NO: 51911 - RNA, 21 nt, RNAi
aucuugugccgucuaggccuu

SEQ ID NO: 51912 - RNA, 21 nt, RNAi
uuuagaacacggcagauccgg

SEQ ID NO: 51913 - DNA, 21 bp, homo sapiens
aaataagcaataagaggctct

SEQ ID NO: 51914 - RNA, 21 nt, RNAi
auaagcaauaagaggcucuuu

SEQ ID NO: 51915 - RNA, 21 nt, RNAi
uuuauucguuauucuccgaga

SEQ ID NO: 51916 - DNA, 21 bp, homo sapiens
aataagcaataagaggctcta

SEQ ID NO: 51917 - RNA, 21 nt, RNAi
uaagcaauaagaggcucuauu

SEQ ID NO: 51918 - RNA, 21 nt, RNAi
uuauucguuauucuccgagau

SEQ ID NO: 51919 - DNA, 21 bp, homo sapiens
aagcaataagaggctctaagc

SEQ ID NO: 51920 - RNA, 21 nt, RNAi
gcaauaagaggcucuaagcuu

SEQ ID NO: 51921 - RNA, 21 nt, RNAi
uucguuauucuccgagauucg

SEQ ID NO: 51922 - DNA, 21 bp, homo sapiens
aataagaggctctaagctgac

SEQ ID NO: 51923 - RNA, 21 nt, RNAi
uaagaggcucuaagcugacuu

SEQ ID NO: 51924 - RNA, 21 nt, RNAi
uuauucuccgagauucgacug

SEQ ID NO: 51925 - DNA, 21 bp, homo sapiens
aagaggctctaagctgactga

SEQ ID NO: 51926 - RNA, 21 nt, RNAi
gaggcucuaagcugacugauu

SEQ ID NO: 51927 - RNA, 21 nt, RNAi
uucuccgagauucgacugacu

SEQ ID NO: 51928 - DNA, 21 bp, homo sapiens
aagctgactgagttgcaagga

SEQ ID NO: 51929 - RNA, 21 nt, RNAi
gcugacugaguugcaaggauu

SEQ ID NO: 51930 - RNA, 21 nt, RNAi
uucgacugacucaacguuccu

SEQ ID NO: 51931 - DNA, 21 bp, homo sapiens
aacagacttgtccaagtgctt

SEQ ID NO: 51932 - RNA, 21 nt, RNAi
cagacuuguccaagugcuuuu

SEQ ID NO: 51933 - RNA, 21 nt, RNAi
uugucugaacagguucacgaa

SEQ ID NO: 51934 - DNA, 21 bp, homo sapiens
aagctactcggccaaacctag

SEQ ID NO: 51935 - RNA, 21 nt, RNAi
gcuacucggccaaaccuaguu

SEQ ID NO: 51936 - RNA, 21 nt, RNAi
uucgaugagccgguuuggauc

SEQ ID NO: 51937 - DNA, 21 bp, homo sapiens
aaatttgctcctcaaaggaat

SEQ ID NO: 51938 - RNA, 21 nt, RNAi
auuugcuccucaaaggaauuu

SEQ ID NO: 51939 - RNA, 21 nt, RNAi
uuuaaacgaggaguuuccuua

SEQ ID NO: 51940 - DNA, 21 bp, homo sapiens
aatttgctcctcaaaggaatc

SEQ ID NO: 51941 - RNA, 21 nt, RNAi
uuugcuccucaaaggaaucuu

SEQ ID NO: 51942 - RNA, 21 nt, RNAi
uuaaacgaggaguuuccuuag

SEQ ID NO: 51943 - DNA, 21 bp, homo sapiens
aaaggaatcaggccagactca

SEQ ID NO: 51944 - RNA, 21 nt, RNAi
aggaaucaggccagacucauu

SEQ ID NO: 51945 - RNA, 21 nt, RNAi
uuuccuuaguccggucugagu

SEQ ID NO: 51946 - DNA, 21 bp, homo sapiens
aaggaatcaggccagactcaa

SEQ ID NO: 51947 - RNA, 21 nt, RNAi
ggaaucaggccagacucaauu

SEQ ID NO: 51948 - RNA, 21 nt, RNAi
uuccuuaguccggucugaguu

SEQ ID NO: 51949 - DNA, 21 bp, homo sapiens
aataggccaccatgcctggtc

SEQ ID NO: 51950 - RNA, 21 nt, RNAi
uaggccaccaugccuggucuu

SEQ ID NO: 51951 - RNA, 21 nt, RNAi
uuauccggugguacggaccag

SEQ ID NO: 51952 - DNA, 21 bp, homo sapiens
aattcaagccatgccaggaat

SEQ ID NO: 51953 - RNA, 21 nt, RNAi
uucaagccaugccaggaauuu

SEQ ID NO: 51954 - RNA, 21 nt, RNAi
uuaaguucgguacgguccuua

SEQ ID NO: 51955 - DNA, 21 bp, homo sapiens
aagccatgccaggaatctgcc

SEQ ID NO: 51956 - RNA, 21 nt, RNAi
gccaugccaggaaucugccuu

SEQ ID NO: 51957 - RNA, 21 nt, RNAi
uucgguacgguccuuagacgg

SEQ ID NO: 51958 - DNA, 21 bp, homo sapiens
aatctgcctacctgccaggtt

SEQ ID NO: 51959 - RNA, 21 nt, RNAi
ucugccuaccugccagguuuu

SEQ ID NO: 51960 - RNA, 21 nt, RNAi
uuagacggauggacgguccaa

SEQ ID NO: 51961 - DNA, 21 bp, homo sapiens
aatttgccttcagttaacatg

SEQ ID NO: 51962 - RNA, 21 nt, RNAi
uuugccuucaguuaacauguu

SEQ ID NO: 51963 - RNA, 21 nt, RNAi
uuaaacggaagucaauuguac

SEQ ID NO: 51964 - DNA, 21 bp, homo sapiens
aaatgtataaactcacctctg

SEQ ID NO: 51965 - RNA, 21 nt, RNAi
auguauaaacucaccucuguu

SEQ ID NO: 51966 - RNA, 21 nt, RNAi
uuuacauauuugaguggagac

SEQ ID NO: 51967 - DNA, 21 bp, homo sapiens
aatgtataaactcacctctgg

SEQ ID NO: 51968 - RNA, 21 nt, RNAi
uguauaaacucaccucugguu

SEQ ID NO: 51969 - RNA, 21 nt, RNAi
uuacauauuugaguggagacc

SEQ ID NO: 51970 - DNA, 21 bp, homo sapiens
aaactcacctctggtaacagt

SEQ ID NO: 51971 - RNA, 21 nt, RNAi
acucaccucugguaacaguuu

SEQ ID NO: 51972 - RNA, 21 nt, RNAi
uuugaguggagaccauuguca

SEQ ID NO: 51973 - DNA, 21 bp, homo sapiens
aactcacctctggtaacagtg

SEQ ID NO: 51974 - RNA, 21 nt, RNAi
cucaccucugguaacaguguu

SEQ ID NO: 51975 - RNA, 21 nt, RNAi
uugaguggagaccauugucac

SEQ ID NO: 51976 - DNA, 21 bp, homo sapiens
aaatgtaaaggcagtctttct

SEQ ID NO: 51977 - RNA, 21 nt, RNAi
auguaaaggcagucuuucuuu

SEQ ID NO: 51978 - RNA, 21 nt, RNAi
uuuacauuuccgucagaaaga

SEQ ID NO: 51979 - DNA, 21 bp, homo sapiens
aatgtaaaggcagtctttctc

SEQ ID NO: 51980 - RNA, 21 nt, RNAi
uguaaaggcagucuuucucuu

SEQ ID NO: 51981 - RNA, 21 nt, RNAi
uuacauuuccgucagaaagag

SEQ ID NO: 51982 - DNA, 21 bp, homo sapiens
aatggatgctattctattctg

SEQ ID NO: 51983 - RNA, 21 nt, RNAi
uggaugcuauucuauucuguu

SEQ ID NO: 51984 - RNA, 21 nt, RNAi
uuaccuacgauaagauaagac

SEQ ID NO: 51985 - DNA, 21 bp, homo sapiens
aaatatttacattcagccagg

SEQ ID NO: 51986 - RNA, 21 nt, RNAi
auauuuacauucagccagguu

SEQ ID NO: 51987 - RNA, 21 nt, RNAi
uuuauaaauguaagucggucc

SEQ ID NO: 51988 - DNA, 21 bp, homo sapiens
aaacttgaaatgcaggacgcc

SEQ ID NO: 51989 - RNA, 21 nt, RNAi
acuugaaaugcaggacgccuu

SEQ ID NO: 51990 - RNA, 21 nt, RNAi
uuugaacuuuacguccugcgg

SEQ ID NO: 51991 - DNA, 21 bp, homo sapiens
aacttgaaatgcaggacgcca

SEQ ID NO: 51992 - RNA, 21 nt, RNAi
cuugaaaugcaggacgccauu

SEQ ID NO: 51993 - RNA, 21 nt, RNAi
uugaacuuuacguccugcggu

SEQ ID NO: 51994 - DNA, 21 bp, homo sapiens
aaatgcaggacgccattaagt

SEQ ID NO: 51995 - RNA, 21 nt, RNAi
augcaggacgccauuaaguuu

SEQ ID NO: 51996 - RNA, 21 nt, RNAi
uuuacguccugcgguaauuca

SEQ ID NO: 51997 - DNA, 21 bp, homo sapiens
aatgcaggacgccattaagtg

SEQ ID NO: 51998 - RNA, 21 nt, RNAi
ugcaggacgccauuaaguguu

SEQ ID NO: 51999 - RNA, 21 nt, RNAi
uuacguccugcgguaauucac

SEQ ID NO: 52000 - DNA, 21 bp, homo sapiens
cactccggattctccatgttg

SEQ ID NO: 52001 - RNA, 21 nt, RNAi
cuccggauucuccauguuguu

SEQ ID NO: 52002 - RNA, 21 nt, RNAi
uugaggccuaagagguacaac

SEQ ID NO: 52003 - DNA, 21 bp, homo sapiens
cagctgtggaagtcggagtct

SEQ ID NO: 52004 - RNA, 21 nt, RNAi
gcuguggaagucggagucuuu

SEQ ID NO: 52005 - RNA, 21 nt, RNAi
uucgacaccuucagccucaga

SEQ ID NO: 52006 - DNA, 21 bp, homo sapiens
caccaagcaaggcctggtctc

SEQ ID NO: 52007 - RNA, 21 nt, RNAi
ccaagcaaggccuggucucuu

SEQ ID NO: 52008 - RNA, 21 nt, RNAi
uugguucguuccggaccagag

SEQ ID NO: 52009 - DNA, 21 bp, homo sapiens
caagcaaggcctggtctccaa

SEQ ID NO: 52010 - RNA, 21 nt, RNAi
agcaaggccuggucuccaauu

SEQ ID NO: 52011 - RNA, 21 nt, RNAi
uuucguuccggaccagagguu

SEQ ID NO: 52012 - DNA, 21 bp, homo sapiens
caaggcctggtctccaagtcc

SEQ ID NO: 52013 - RNA, 21 nt, RNAi
aggccuggucuccaaguccuu

SEQ ID NO: 52014 - RNA, 21 nt, RNAi
uuuccggaccagagguucagg

SEQ ID NO: 52015 - DNA, 21 bp, homo sapiens
caagtcctctcctaagaagcc

SEQ ID NO: 52016 - RNA, 21 nt, RNAi
aguccucuccuaagaagccuu

SEQ ID NO: 52017 - RNA, 21 nt, RNAi
uuucaggagaggauucuucgg

SEQ ID NO: 52018 - DNA, 21 bp, homo sapiens
cagcatgttggccagtcaagt

SEQ ID NO: 52019 - RNA, 21 nt, RNAi
gcauguuggccagucaaguuu

SEQ ID NO: 52020 - RNA, 21 nt, RNAi
uucguacaaccggucaguuca

SEQ ID NO: 52021 - DNA, 21 bp, homo sapiens
catgttggccagtcaagttcc

SEQ ID NO: 52022 - RNA, 21 nt, RNAi
uguuggccagucaaguuccuu

SEQ ID NO: 52023 - RNA, 21 nt, RNAi
uuacaaccggucaguucaagg

SEQ ID NO: 52024 - DNA, 21 bp, homo sapiens
cagtcaagttcctccactgag

SEQ ID NO: 52025 - RNA, 21 nt, RNAi
gucaaguuccuccacugaguu

SEQ ID NO: 52026 - RNA, 21 nt, RNAi
uucaguucaaggaggugacuc

SEQ ID NO: 52027 - DNA, 21 bp, homo sapiens
caagttcctccactgagctcg

SEQ ID NO: 52028 - RNA, 21 nt, RNAi
aguuccuccacugagcucguu

SEQ ID NO: 52029 - RNA, 21 nt, RNAi
uuucaaggaggugacucgagc

SEQ ID NO: 52030 - DNA, 21 bp, homo sapiens
cactgagctcgctgcgtataa

SEQ ID NO: 52031 - RNA, 21 nt, RNAi
cugagcucgcugcguauaauu

SEQ ID NO: 52032 - RNA, 21 nt, RNAi
uugacucgagcgacgcauauu

SEQ ID NO: 52033 - DNA, 21 bp, homo sapiens
caaacaccattgctaagtcgg

SEQ ID NO: 52034 - RNA, 21 nt, RNAi
aacaccauugcuaagucgguu

SEQ ID NO: 52035 - RNA, 21 nt, RNAi
uuuugugguaacgauucagcc

SEQ ID NO: 52036 - DNA, 21 bp, homo sapiens
caccattgctaagtcggatct

SEQ ID NO: 52037 - RNA, 21 nt, RNAi
ccauugcuaagucggaucuuu

SEQ ID NO: 52038 - RNA, 21 nt, RNAi
uugguaacgauucagccuaga

SEQ ID NO: 52039 - DNA, 21 bp, homo sapiens
cattgctaagtcggatctgct

SEQ ID NO: 52040 - RNA, 21 nt, RNAi
uugcuaagucggaucugcuuu

SEQ ID NO: 52041 - RNA, 21 nt, RNAi
uuaacgauucagccuagacga

SEQ ID NO: 52042 - DNA, 21 bp, homo sapiens
cagtgtctccagtaccagttc

SEQ ID NO: 52043 - RNA, 21 nt, RNAi
gugucuccaguaccaguucuu

SEQ ID NO: 52044 - RNA, 21 nt, RNAi
uucacagaggucauggucaag

SEQ ID NO: 52045 - DNA, 21 bp, homo sapiens
cagtaccagttctaccagatc

SEQ ID NO: 52046 - RNA, 21 nt, RNAi
guaccaguucuaccagaucuu

SEQ ID NO: 52047 - RNA, 21 nt, RNAi
uucauggucaagauggucuag

SEQ ID NO: 52048 - DNA, 21 bp, homo sapiens
cagaggtgacagaggaagatc

SEQ ID NO: 52049 - RNA, 21 nt, RNAi
gaggugacagaggaagaucuu

SEQ ID NO: 52050 - RNA, 21 nt, RNAi
uucuccacugucuccuucuag

SEQ ID NO: 52051 - DNA, 21 bp, homo sapiens
cagaggaagatcaaggaagga

SEQ ID NO: 52052 - RNA, 21 nt, RNAi
gaggaagaucaaggaaggauu

SEQ ID NO: 52053 - RNA, 21 nt, RNAi
uucuccuucuaguuccuuccu

SEQ ID NO: 52054 - DNA, 21 bp, homo sapiens
caaggaaggatctgtgtggtc

SEQ ID NO: 52055 - RNA, 21 nt, RNAi
aggaaggaucuguguggucuu

SEQ ID NO: 52056 - RNA, 21 nt, RNAi
uuuccuuccuagacacaccag

SEQ ID NO: 52057 - DNA, 21 bp, homo sapiens
catagctcctttaagccaatc

SEQ ID NO: 52058 - RNA, 21 nt, RNAi
uagcuccuuuaagccaaucuu

SEQ ID NO: 52059 - RNA, 21 nt, RNAi
uuaucgaggaaauucgguuag

SEQ ID NO: 52060 - DNA, 21 bp, homo sapiens
caatcaacaatgctgacttca

SEQ ID NO: 52061 - RNA, 21 nt, RNAi
aucaacaaugcugacuucauu

SEQ ID NO: 52062 - RNA, 21 nt, RNAi
uuuaguuguuacgacugaagu

SEQ ID NO: 52063 - DNA, 21 bp, homo sapiens
caacaatgctgacttcatagt

SEQ ID NO: 52064 - RNA, 21 nt, RNAi
acaaugcugacuucauaguuu

SEQ ID NO: 52065 - RNA, 21 nt, RNAi
uuuguuacgacugaaguauca

SEQ ID NO: 52066 - DNA, 21 bp, homo sapiens
caatgctgacttcatagtgcc

SEQ ID NO: 52067 - RNA, 21 nt, RNAi
augcugacuucauagugccuu

SEQ ID NO: 52068 - RNA, 21 nt, RNAi
uuuacgacugaaguaucacgg

SEQ ID NO: 52069 - DNA, 21 bp, homo sapiens
catagtgcctatagagattga

SEQ ID NO: 52070 - RNA, 21 nt, RNAi
uagugccuauagagauugauu

SEQ ID NO: 52071 - RNA, 21 nt, RNAi
uuaucacggauaucucuaacu

SEQ ID NO: 52072 - DNA, 21 bp, homo sapiens
cactcaccaggtgtatgtgct

SEQ ID NO: 52073 - RNA, 21 nt, RNAi
cucaccagguguaugugcuuu

SEQ ID NO: 52074 - RNA, 21 nt, RNAi
uugagugguccacauacacga

SEQ ID NO: 52075 - DNA, 21 bp, homo sapiens
caccaggtgtatgtgctcaag

SEQ ID NO: 52076 - RNA, 21 nt, RNAi
ccagguguaugugcucaaguu

SEQ ID NO: 52077 - RNA, 21 nt, RNAi
uugguccacauacacgaguuc

SEQ ID NO: 52078 - DNA, 21 bp, homo sapiens
caggtgtatgtgctcaagagg

SEQ ID NO: 52079 - RNA, 21 nt, RNAi
gguguaugugcucaagagguu

SEQ ID NO: 52080 - RNA, 21 nt, RNAi
uuccacauacacgaguucucc

SEQ ID NO: 52081 - DNA, 21 bp, homo sapiens
caagaggccttatgtggatga

SEQ ID NO: 52082 - RNA, 21 nt, RNAi
agaggccuuauguggaugauu

SEQ ID NO: 52083 - RNA, 21 nt, RNAi
uuucuccggaauacaccuacu

SEQ ID NO: 52084 - DNA, 21 bp, homo sapiens
cactgccagcctggccaagta

SEQ ID NO: 52085 - RNA, 21 nt, RNAi
cugccagccuggccaaguauu

SEQ ID NO: 52086 - RNA, 21 nt, RNAi
uugacggucggaccgguucau

SEQ ID NO: 52087 - DNA, 21 bp, homo sapiens
cagcctggccaagtatgccga

SEQ ID NO: 52088 - RNA, 21 nt, RNAi
gccuggccaaguaugccgauu

SEQ ID NO: 52089 - RNA, 21 nt, RNAi
uucggaccgguucauacggcu

SEQ ID NO: 52090 - DNA, 21 bp, homo sapiens
catcctggacaactcgcctgc

SEQ ID NO: 52091 - RNA, 21 nt, RNAi
uccuggacaacucgccugcuu

SEQ ID NO: 52092 - RNA, 21 nt, RNAi
uuaggaccuguugagcggacg

SEQ ID NO: 52093 - DNA, 21 bp, homo sapiens
caactcgcctgcttcttacat

SEQ ID NO: 52094 - RNA, 21 nt, RNAi
acucgccugcuucuuacauuu

SEQ ID NO: 52095 - RNA, 21 nt, RNAi
uuugagcggacgaagaaugua

SEQ ID NO: 52096 - DNA, 21 bp, homo sapiens
cagtgcctgtgcagtcctggt

SEQ ID NO: 52097 - RNA, 21 nt, RNAi
gugccugugcaguccugguuu

SEQ ID NO: 52098 - RNA, 21 nt, RNAi
uucacggacacgucaggacca

SEQ ID NO: 52099 - DNA, 21 bp, homo sapiens
cagtcctggtttgatgacatg

SEQ ID NO: 52100 - RNA, 21 nt, RNAi
guccugguuugaugacauguu

SEQ ID NO: 52101 - RNA, 21 nt, RNAi
uucaggaccaaacuacuguac

SEQ ID NO: 52102 - DNA, 21 bp, homo sapiens
catggcagacactgagttgct

SEQ ID NO: 52103 - RNA, 21 nt, RNAi
uggcagacacugaguugcuuu

SEQ ID NO: 52104 - RNA, 21 nt, RNAi
uuaccgucugugacucaacga

SEQ ID NO: 52105 - DNA, 21 bp, homo sapiens
cagacactgagttgctgaacc

SEQ ID NO: 52106 - RNA, 21 nt, RNAi
gacacugaguugcugaaccuu

SEQ ID NO: 52107 - RNA, 21 nt, RNAi
uucugugacucaacgacuugg

SEQ ID NO: 52108 - DNA, 21 bp, homo sapiens
cactgagttgctgaacctgat

SEQ ID NO: 52109 - RNA, 21 nt, RNAi
cugaguugcugaaccugauuu

SEQ ID NO: 52110 - RNA, 21 nt, RNAi
uugacucaacgacuuggacua

SEQ ID NO: 52111 - DNA, 21 bp, homo sapiens
caatctttgaggagctgagcg

SEQ ID NO: 52112 - RNA, 21 nt, RNAi
aucuuugaggagcugagcguu

SEQ ID NO: 52113 - RNA, 21 nt, RNAi
uuuagaaacuccucgacucgc

SEQ ID NO: 52114 - DNA, 21 bp, homo sapiens
cagaggacgtctacaccagcc

SEQ ID NO: 52115 - RNA, 21 nt, RNAi
gaggacgucuacaccagccuu

SEQ ID NO: 52116 - RNA, 21 nt, RNAi
uucuccugcagauguggucgg

SEQ ID NO: 52117 - DNA, 21 bp, homo sapiens
cacactgtgcctttacgatca

SEQ ID NO: 52118 - RNA, 21 nt, RNAi
cacugugccuuuacgaucauu

SEQ ID NO: 52119 - RNA, 21 nt, RNAi
uugugacacggaaaugcuagu

SEQ ID NO: 52120 - DNA, 21 bp, homo sapiens
cactgtgcctttacgatcagc

SEQ ID NO: 52121 - RNA, 21 nt, RNAi
cugugccuuuacgaucagcuu

SEQ ID NO: 52122 - RNA, 21 nt, RNAi
uugacacggaaaugcuagucg

SEQ ID NO: 52123 - DNA, 21 bp, homo sapiens
cagcgtgacagagtagaagct

SEQ ID NO: 52124 - RNA, 21 nt, RNAi
gcgugacagaguagaagcuuu

SEQ ID NO: 52125 - RNA, 21 nt, RNAi
uucgcacugucucaucuucga

SEQ ID NO: 52126 - DNA, 21 bp, homo sapiens
cagagtagaagctggagtgcc

SEQ ID NO: 52127 - RNA, 21 nt, RNAi
gaguagaagcuggagugccuu

SEQ ID NO: 52128 - RNA, 21 nt, RNAi
uucucaucuucgaccucacgg

SEQ ID NO: 52129 - DNA, 21 bp, homo sapiens
cagagctacctgccgccaact

SEQ ID NO: 52130 - RNA, 21 nt, RNAi
gagcuaccugccgccaacuuu

SEQ ID NO: 52131 - RNA, 21 nt, RNAi
uucucgauggacggcgguuga

SEQ ID NO: 52132 - DNA, 21 bp, homo sapiens
caacttgttgagatgtgtgtt

SEQ ID NO: 52133 - RNA, 21 nt, RNAi
acuuguugagauguguguuuu

SEQ ID NO: 52134 - RNA, 21 nt, RNAi
uuugaacaacucuacacacaa

SEQ ID NO: 52135 - DNA, 21 bp, homo sapiens
cagtgtatagtgtttcagtgg

SEQ ID NO: 52136 - RNA, 21 nt, RNAi
guguauaguguuucagugguu

SEQ ID NO: 52137 - RNA, 21 nt, RNAi
uucacauaucacaaagucacc

SEQ ID NO: 52138 - DNA, 21 bp, homo sapiens
caagttagcttgtctcctctc

SEQ ID NO: 52139 - RNA, 21 nt, RNAi
aguuagcuugucuccucucuu

SEQ ID NO: 52140 - RNA, 21 nt, RNAi
uuucaaucgaacagaggagag

SEQ ID NO: 52141 - DNA, 21 bp, homo sapiens
cattgccaaaccatggccttt

SEQ ID NO: 52142 - RNA, 21 nt, RNAi
uugccaaaccauggccuuuuu

SEQ ID NO: 52143 - RNA, 21 nt, RNAi
uuaacgguuugguaccggaaa

SEQ ID NO: 52144 - DNA, 21 bp, homo sapiens
caaaccatggcctttcctcag

SEQ ID NO: 52145 - RNA, 21 nt, RNAi
aaccauggccuuuccucaguu

SEQ ID NO: 52146 - RNA, 21 nt, RNAi
uuuugguaccggaaaggaguc

SEQ ID NO: 52147 - DNA, 21 bp, homo sapiens
catggcctttcctcagtgttg

SEQ ID NO: 52148 - RNA, 21 nt, RNAi
uggccuuuccucaguguuguu

SEQ ID NO: 52149 - RNA, 21 nt, RNAi
uuaccggaaaggagucacaac

SEQ ID NO: 52150 - DNA, 21 bp, homo sapiens
cagtgttgtaaggcctatgcc

SEQ ID NO: 52151 - RNA, 21 nt, RNAi
guguuguaaggccuaugccuu

SEQ ID NO: 52152 - RNA, 21 nt, RNAi
uucacaacauuccggauacgg

SEQ ID NO: 52153 - DNA, 21 bp, homo sapiens
caggcatacacctttctgaaa

SEQ ID NO: 52154 - RNA, 21 nt, RNAi
ggcauacaccuuucugaaauu

SEQ ID NO: 52155 - RNA, 21 nt, RNAi
uuccguauguggaaagacuuu

SEQ ID NO: 52156 - DNA, 21 bp, homo sapiens
catacacctttctgaaatcct

SEQ ID NO: 52157 - RNA, 21 nt, RNAi
uacaccuuucugaaauccuuu

SEQ ID NO: 52158 - RNA, 21 nt, RNAi
uuauguggaaagacuuuagga

SEQ ID NO: 52159 - DNA, 21 bp, homo sapiens
cacctttctgaaatccttctc

SEQ ID NO: 52160 - RNA, 21 nt, RNAi
ccuuucugaaauccuucucuu

SEQ ID NO: 52161 - RNA, 21 nt, RNAi
uuggaaagacuuuaggaagag

SEQ ID NO: 52162 - DNA, 21 bp, homo sapiens
cagccagctgctgcagacaaa

SEQ ID NO: 52163 - RNA, 21 nt, RNAi
gccagcugcugcagacaaauu

SEQ ID NO: 52164 - RNA, 21 nt, RNAi
uucggucgacgacgucuguuu

SEQ ID NO: 52165 - DNA, 21 bp, homo sapiens
cagaccagcatccagtggcca

SEQ ID NO: 52166 - RNA, 21 nt, RNAi
gaccagcauccaguggccauu

SEQ ID NO: 52167 - RNA, 21 nt, RNAi
uucuggucguaggucaccggu

SEQ ID NO: 52168 - DNA, 21 bp, homo sapiens
cagcatccagtggccatcagg

SEQ ID NO: 52169 - RNA, 21 nt, RNAi
gcauccaguggccaucagguu

SEQ ID NO: 52170 - RNA, 21 nt, RNAi
uucguaggucaccgguagucc

SEQ ID NO: 52171 - DNA, 21 bp, homo sapiens
catccagtggccatcaggtct

SEQ ID NO: 52172 - RNA, 21 nt, RNAi
uccaguggccaucaggucuuu

SEQ ID NO: 52173 - RNA, 21 nt, RNAi
uuaggucaccgguaguccaga

SEQ ID NO: 52174 - DNA, 21 bp, homo sapiens
cagtggccatcaggtcttgtg

SEQ ID NO: 52175 - RNA, 21 nt, RNAi
guggccaucaggucuuguguu

SEQ ID NO: 52176 - RNA, 21 nt, RNAi
uucaccgguaguccagaacac

SEQ ID NO: 52177 - DNA, 21 bp, homo sapiens
caaaggctatgcttgcctccg

SEQ ID NO: 52178 - RNA, 21 nt, RNAi
aaggcuaugcuugccuccguu

SEQ ID NO: 52179 - RNA, 21 nt, RNAi
uuuuccgauacgaacggaggc

SEQ ID NO: 52180 - DNA, 21 bp, homo sapiens
caccacctagccatagtctca

SEQ ID NO: 52181 - RNA, 21 nt, RNAi
ccaccuagccauagucucauu

SEQ ID NO: 52182 - RNA, 21 nt, RNAi
uugguggaucgguaucagagu

SEQ ID NO: 52183 - DNA, 21 bp, homo sapiens
cacctagccatagtctcaaac

SEQ ID NO: 52184 - RNA, 21 nt, RNAi
ccuagccauagucucaaacuu

SEQ ID NO: 52185 - RNA, 21 nt, RNAi
uuggaucgguaucagaguuug

SEQ ID NO: 52186 - DNA, 21 bp, homo sapiens
cagataactgatttccgttct

SEQ ID NO: 52187 - RNA, 21 nt, RNAi
gauaacugauuuccguucuuu

SEQ ID NO: 52188 - RNA, 21 nt, RNAi
uucuauugacuaaaggcaaga

SEQ ID NO: 52189 - DNA, 21 bp, homo sapiens
caaatcctcaaagcgtggacg

SEQ ID NO: 52190 - RNA, 21 nt, RNAi
aauccucaaagcguggacguu

SEQ ID NO: 52191 - RNA, 21 nt, RNAi
uuuuaggaguuucgcaccugc

SEQ ID NO: 52192 - DNA, 21 bp, homo sapiens
catggcttgtggatcagctaa

SEQ ID NO: 52193 - RNA, 21 nt, RNAi
uggcuuguggaucagcuaauu

SEQ ID NO: 52194 - RNA, 21 nt, RNAi
uuaccgaacaccuagucgauu

SEQ ID NO: 52195 - DNA, 21 bp, homo sapiens
caaggacttctgttccaaagg

SEQ ID NO: 52196 - RNA, 21 nt, RNAi
aggacuucuguuccaaagguu

SEQ ID NO: 52197 - RNA, 21 nt, RNAi
uuuccugaagacaagguuucc

SEQ ID NO: 52198 - DNA, 21 bp, homo sapiens
cagaactcttgctcttcctgg

SEQ ID NO: 52199 - RNA, 21 nt, RNAi
gaacucuugcucuuccugguu

SEQ ID NO: 52200 - RNA, 21 nt, RNAi
uucuugagaacgagaaggacc

SEQ ID NO: 52201 - DNA, 21 bp, homo sapiens
catgtgacagcctaatgcgca

SEQ ID NO: 52202 - RNA, 21 nt, RNAi
ugugacagccuaaugcgcauu

SEQ ID NO: 52203 - RNA, 21 nt, RNAi
uuacacugucggauuacgcgu

SEQ ID NO: 52204 - DNA, 21 bp, homo sapiens
cagcctaatgcgcatgctttc

SEQ ID NO: 52205 - RNA, 21 nt, RNAi
gccuaaugcgcaugcuuucuu

SEQ ID NO: 52206 - RNA, 21 nt, RNAi
uucggauuacgcguacgaaag

SEQ ID NO: 52207 - DNA, 21 bp, homo sapiens
catgctttctgcctctggtaa

SEQ ID NO: 52208 - RNA, 21 nt, RNAi
ugcuuucugccucugguaauu

SEQ ID NO: 52209 - RNA, 21 nt, RNAi
uuacgaaagacggagaccauu

SEQ ID NO: 52210 - DNA, 21 bp, homo sapiens
cacctcagcatcactgcctta

SEQ ID NO: 52211 - RNA, 21 nt, RNAi
ccucagcaucacugccuuauu

SEQ ID NO: 52212 - RNA, 21 nt, RNAi
uuggagucguagugacggaau

SEQ ID NO: 52213 - DNA, 21 bp, homo sapiens
cagcatcactgccttaatcgt

SEQ ID NO: 52214 - RNA, 21 nt, RNAi
gcaucacugccuuaaucguuu

SEQ ID NO: 52215 - RNA, 21 nt, RNAi
uucguagugacggaauuagca

SEQ ID NO: 52216 - DNA, 21 bp, homo sapiens
catcactgccttaatcgtggc

SEQ ID NO: 52217 - RNA, 21 nt, RNAi
ucacugccuuaaucguggcuu

SEQ ID NO: 52218 - RNA, 21 nt, RNAi
uuagugacggaauuagcaccg

SEQ ID NO: 52219 - DNA, 21 bp, homo sapiens
cactgccttaatcgtggcctc

SEQ ID NO: 52220 - RNA, 21 nt, RNAi
cugccuuaaucguggccucuu

SEQ ID NO: 52221 - RNA, 21 nt, RNAi
uugacggaauuagcaccggag

SEQ ID NO: 52222 - DNA, 21 bp, homo sapiens
caggtatcacaaagcatttgt

SEQ ID NO: 52223 - RNA, 21 nt, RNAi
gguaucacaaagcauuuguuu

SEQ ID NO: 52224 - RNA, 21 nt, RNAi
uuccauaguguuucguaaaca

SEQ ID NO: 52225 - DNA, 21 bp, homo sapiens
cacaaagcatttgtgaattgc

SEQ ID NO: 52226 - RNA, 21 nt, RNAi
caaagcauuugugaauugcuu

SEQ ID NO: 52227 - RNA, 21 nt, RNAi
uuguuucguaaacacuuaacg

SEQ ID NO: 52228 - DNA, 21 bp, homo sapiens
caaagcatttgtgaattgctt

SEQ ID NO: 52229 - RNA, 21 nt, RNAi
aagcauuugugaauugcuuuu

SEQ ID NO: 52230 - RNA, 21 nt, RNAi
uuuucguaaacacuuaacgaa

SEQ ID NO: 52231 - DNA, 21 bp, homo sapiens
catttgtgaattgctttaggt

SEQ ID NO: 52232 - RNA, 21 nt, RNAi
uuugugaauugcuuuagguuu

SEQ ID NO: 52233 - RNA, 21 nt, RNAi
uuaaacacuuaacgaaaucca

SEQ ID NO: 52234 - DNA, 21 bp, homo sapiens
cagcctcaggaactaacaagt

SEQ ID NO: 52235 - RNA, 21 nt, RNAi
gccucaggaacuaacaaguuu

SEQ ID NO: 52236 - RNA, 21 nt, RNAi
uucggaguccuugauuguuca

SEQ ID NO: 52237 - DNA, 21 bp, homo sapiens
caggaactaacaagttktgag

SEQ ID NO: 52238 - RNA, 21 nt, RNAi
ggaacuaacaaguukugaguu

SEQ ID NO: 52239 - RNA, 20 nt, RNAi
uuccuugauuguucaaacuc

SEQ ID NO: 52240 - DNA, 21 bp, homo sapiens
caggtggtagagcagcagctt

SEQ ID NO: 52241 - RNA, 21 nt, RNAi
ggugguagagcagcagcuuuu

SEQ ID NO: 52242 - RNA, 21 nt, RNAi
uuccaccaucucgucgucgaa

SEQ ID NO: 52243 - DNA, 21 bp, homo sapiens
cagcagcttcgtgctctcagc

SEQ ID NO: 52244 - RNA, 21 nt, RNAi
gcagcuucgugcucucagcuu

SEQ ID NO: 52245 - RNA, 21 nt, RNAi
uucgucgaagcacgagagucg

SEQ ID NO: 52246 - DNA, 21 bp, homo sapiens
cagcttcgtgctctcagcggt

SEQ ID NO: 52247 - RNA, 21 nt, RNAi
gcuucgugcucucagcgguuu

SEQ ID NO: 52248 - RNA, 21 nt, RNAi
uucgaagcacgagagucgcca

SEQ ID NO: 52249 - DNA, 21 bp, homo sapiens
caaggttataaggccttgtct

SEQ ID NO: 52250 - RNA, 21 nt, RNAi
agguuauaaggccuugucuuu

SEQ ID NO: 52251 - RNA, 21 nt, RNAi
uuuccaauauuccggaacaga

SEQ ID NO: 52252 - DNA, 21 bp, homo sapiens
cagaactcatgtgghcatttc

SEQ ID NO: 52253 - RNA, 21 nt, RNAi
gaacucaugugghcauuucuu

SEQ ID NO: 52254 - RNA, 20 nt, RNAi
uucuugaguacaccguaaag

SEQ ID NO: 52255 - DNA, 21 bp, homo sapiens
catgtgghcatttccgacagc

SEQ ID NO: 52256 - RNA, 21 nt, RNAi
ugugghcauuuccgacagcuu

SEQ ID NO: 52257 - RNA, 20 nt, RNAi
uuacaccguaaaggcugucg

SEQ ID NO: 52258 - DNA, 21 bp, homo sapiens
catttccgacagcatcactcc

SEQ ID NO: 52259 - RNA, 21 nt, RNAi
uuuccgacagcaucacuccuu

SEQ ID NO: 52260 - RNA, 21 nt, RNAi
uuaaaggcugucguagugagg

SEQ ID NO: 52261 - DNA, 21 bp, homo sapiens
catgtgctagccagaaatata

SEQ ID NO: 52262 - RNA, 21 nt, RNAi
ugugcuagccagaaauauauu

SEQ ID NO: 52263 - RNA, 21 nt, RNAi
uuacacgaucggucuuuauau

SEQ ID NO: 52264 - DNA, 21 bp, homo sapiens
cagaaatatactgtctcttga

SEQ ID NO: 52265 - RNA, 21 nt, RNAi
gaaauauacugucucuugauu

SEQ ID NO: 52266 - RNA, 21 nt, RNAi
uucuuuauaugacagagaacu

SEQ ID NO: 52267 - DNA, 21 bp, homo sapiens
caggagctcagactcttagag

SEQ ID NO: 52268 - RNA, 21 nt, RNAi
ggagcucagacucuuagaguu

SEQ ID NO: 52269 - RNA, 21 nt, RNAi
uuccucgagucugagaaucuc

SEQ ID NO: 52270 - DNA, 21 bp, homo sapiens
cagactcttagagccagctgt

SEQ ID NO: 52271 - RNA, 21 nt, RNAi
gacucuuagagccagcuguuu

SEQ ID NO: 52272 - RNA, 21 nt, RNAi
uucugagaaucucggucgaca

SEQ ID NO: 52273 - DNA, 21 bp, homo sapiens
caaggcctgacctaggctgct

SEQ ID NO: 52274 - RNA, 21 nt, RNAi
aggccugaccuaggcugcuuu

SEQ ID NO: 52275 - RNA, 21 nt, RNAi
uuuccggacuggauccgacga

SEQ ID NO: 52276 - DNA, 21 bp, homo sapiens
caaatcttgtgccgtctaggc

SEQ ID NO: 52277 - RNA, 21 nt, RNAi
aaucuugugccgucuaggcuu

SEQ ID NO: 52278 - RNA, 21 nt, RNAi
uuuuagaacacggcagauccg

SEQ ID NO: 52279 - DNA, 21 bp, homo sapiens
caataagaggctctaagctga

SEQ ID NO: 52280 - RNA, 21 nt, RNAi
auaagaggcucuaagcugauu

SEQ ID NO: 52281 - RNA, 21 nt, RNAi
uuuauucuccgagauucgacu

SEQ ID NO: 52282 - DNA, 21 bp, homo sapiens
catgtttctccagatggcgga

SEQ ID NO: 52283 - RNA, 21 nt, RNAi
uguuucuccagauggcggauu

SEQ ID NO: 52284 - RNA, 21 nt, RNAi
uuacaaagaggucuaccgccu

SEQ ID NO: 52285 - DNA, 21 bp, homo sapiens
cagatggcggaagagcatgtg

SEQ ID NO: 52286 - RNA, 21 nt, RNAi
gauggcggaagagcauguguu

SEQ ID NO: 52287 - RNA, 21 nt, RNAi
uucuaccgccuucucguacac

SEQ ID NO: 52288 - DNA, 21 bp, homo sapiens
cagacttgtccaagtgcttgg

SEQ ID NO: 52289 - RNA, 21 nt, RNAi
gacuuguccaagugcuugguu

SEQ ID NO: 52290 - RNA, 21 nt, RNAi
uucugaacagguucacgaacc

SEQ ID NO: 52291 - DNA, 21 bp, homo sapiens
cagagaagctactcggccaaa

SEQ ID NO: 52292 - RNA, 21 nt, RNAi
gagaagcuacucggccaaauu

SEQ ID NO: 52293 - RNA, 21 nt, RNAi
uucucuucgaugagccgguuu

SEQ ID NO: 52294 - DNA, 21 bp, homo sapiens
cagagccagcctagtcattat

SEQ ID NO: 52295 - RNA, 21 nt, RNAi
gagccagccuagucauuauuu

SEQ ID NO: 52296 - RNA, 21 nt, RNAi
uucucggucggaucaguaaua

SEQ ID NO: 52297 - DNA, 21 bp, homo sapiens
cagcctagtcattatttgctg

SEQ ID NO: 52298 - RNA, 21 nt, RNAi
gccuagucauuauuugcuguu

SEQ ID NO: 52299 - RNA, 21 nt, RNAi
uucggaucaguaauaaacgac

SEQ ID NO: 52300 - DNA, 21 bp, homo sapiens
caaaggaatcaggccagactc

SEQ ID NO: 52301 - RNA, 21 nt, RNAi
aaggaaucaggccagacucuu

SEQ ID NO: 52302 - RNA, 21 nt, RNAi
uuuuccuuaguccggucugag

SEQ ID NO: 52303 - DNA, 21 bp, homo sapiens
caataggccaccatgcctggt

SEQ ID NO: 52304 - RNA, 21 nt, RNAi
auaggccaccaugccugguuu

SEQ ID NO: 52305 - RNA, 21 nt, RNAi
uuuauccggugguacggacca

SEQ ID NO: 52306 - DNA, 21 bp, homo sapiens
caccatgcctggtcagcacca

SEQ ID NO: 52307 - RNA, 21 nt, RNAi
ccaugccuggucagcaccauu

SEQ ID NO: 52308 - RNA, 21 nt, RNAi
uugguacggaccagucguggu

SEQ ID NO: 52309 - DNA, 21 bp, homo sapiens
catgcctggtcagcaccaatt

SEQ ID NO: 52310 - RNA, 21 nt, RNAi
ugccuggucagcaccaauuuu

SEQ ID NO: 52311 - RNA, 21 nt, RNAi
uuacggaccagucgugguuaa

SEQ ID NO: 52312 - DNA, 21 bp, homo sapiens
cagcaccaattcaagccatgc

SEQ ID NO: 52313 - RNA, 21 nt, RNAi
gcaccaauucaagccaugcuu

SEQ ID NO: 52314 - RNA, 21 nt, RNAi
uucgugguuaaguucgguacg

SEQ ID NO: 52315 - DNA, 21 bp, homo sapiens
caccaattcaagccatgccag

SEQ ID NO: 52316 - RNA, 21 nt, RNAi
ccaauucaagccaugccaguu

SEQ ID NO: 52317 - RNA, 21 nt, RNAi
uugguuaaguucgguacgguc

SEQ ID NO: 52318 - DNA, 21 bp, homo sapiens
caattcaagccatgccaggaa

SEQ ID NO: 52319 - RNA, 21 nt, RNAi
auucaagccaugccaggaauu

SEQ ID NO: 52320 - RNA, 21 nt, RNAi
uuuaaguucgguacgguccuu

SEQ ID NO: 52321 - DNA, 21 bp, homo sapiens
caagccatgccaggaatctgc

SEQ ID NO: 52322 - RNA, 21 nt, RNAi
agccaugccaggaaucugcuu

SEQ ID NO: 52323 - RNA, 21 nt, RNAi
uuucgguacgguccuuagacg

SEQ ID NO: 52324 - DNA, 21 bp, homo sapiens
catgccaggaatctgcctacc

SEQ ID NO: 52325 - RNA, 21 nt, RNAi
ugccaggaaucugccuaccuu

SEQ ID NO: 52326 - RNA, 21 nt, RNAi
uuacgguccuuagacggaugg

SEQ ID NO: 52327 - DNA, 21 bp, homo sapiens
caggaatctgcctacctgcca

SEQ ID NO: 52328 - RNA, 21 nt, RNAi
ggaaucugccuaccugccauu

SEQ ID NO: 52329 - RNA, 21 nt, RNAi
uuccuuagacggauggacggu

SEQ ID NO: 52330 - DNA, 21 bp, homo sapiens
cacagtgtgtctctctgattg

SEQ ID NO: 52331 - RNA, 21 nt, RNAi
cagugugucucucugauuguu

SEQ ID NO: 52332 - RNA, 21 nt, RNAi
uugucacacagagagacuaac

SEQ ID NO: 52333 - DNA, 21 bp, homo sapiens
cagacgctgctttgtgctaaa

SEQ ID NO: 52334 - RNA, 21 nt, RNAi
gacgcugcuuugugcuaaauu

SEQ ID NO: 52335 - RNA, 21 nt, RNAi
uucugcgacgaaacacgauuu

SEQ ID NO: 52336 - DNA, 21 bp, homo sapiens
cagtgtcctagccaggccaag

SEQ ID NO: 52337 - RNA, 21 nt, RNAi
guguccuagccaggccaaguu

SEQ ID NO: 52338 - RNA, 21 nt, RNAi
uucacaggaucgguccgguuc

SEQ ID NO: 52339 - DNA, 21 bp, homo sapiens
caggccaagtatatgagaaag

SEQ ID NO: 52340 - RNA, 21 nt, RNAi
ggccaaguauaugagaaaguu

SEQ ID NO: 52341 - RNA, 21 nt, RNAi
uuccgguucauauacucuuuc

SEQ ID NO: 52342 - DNA, 21 bp, homo sapiens
caagtatatgagaaaggtaag

SEQ ID NO: 52343 - RNA, 21 nt, RNAi
aguauaugagaaagguaaguu

SEQ ID NO: 52344 - RNA, 21 nt, RNAi
uuucauauacucuuuccauuc

SEQ ID NO: 52345 - DNA, 21 bp, homo sapiens
caggtcctcagtggattactt

SEQ ID NO: 52346 - RNA, 21 nt, RNAi
gguccucaguggauuacuuuu

SEQ ID NO: 52347 - RNA, 21 nt, RNAi
uuccaggagucaccuaaugaa

SEQ ID NO: 52348 - DNA, 21 bp, homo sapiens
cagtggattacttaaccactg

SEQ ID NO: 52349 - RNA, 21 nt, RNAi
guggauuacuuaaccacuguu

SEQ ID NO: 52350 - RNA, 21 nt, RNAi
uucaccuaaugaauuggugac

SEQ ID NO: 52351 - DNA, 21 bp, homo sapiens
catgttccatttcgtgccgct

SEQ ID NO: 52352 - RNA, 21 nt, RNAi
uguuccauuucgugccgcuuu

SEQ ID NO: 52353 - RNA, 21 nt, RNAi
uuacaagguaaagcacggcga

SEQ ID NO: 52354 - DNA, 21 bp, homo sapiens
caggacgccattaagtgtctg

SEQ ID NO: 52355 - RNA, 21 nt, RNAi
ggacgccauuaagugucuguu

SEQ ID NO: 52356 - RNA, 21 nt, RNAi
uuccugcgguaauucacagac

SEQ ID NO: 52357 - DNA, 21 bp, homo sapiens
gatgtgaacagctgtggaagt

SEQ ID NO: 52358 - RNA, 21 nt, RNAi
ugugaacagcuguggaaguuu

SEQ ID NO: 52359 - RNA, 21 nt, RNAi
uuacacuugucgacaccuuca

SEQ ID NO: 52360 - DNA, 21 bp, homo sapiens
gaacagctgtggaagtcggag

SEQ ID NO: 52361 - RNA, 21 nt, RNAi
acagcuguggaagucggaguu

SEQ ID NO: 52362 - RNA, 21 nt, RNAi
uuugucgacaccuucagccuc

SEQ ID NO: 52363 - DNA, 21 bp, homo sapiens
gattgttagatggaacacggc

SEQ ID NO: 52364 - RNA, 21 nt, RNAi
uuguuagauggaacacggcuu

SEQ ID NO: 52365 - RNA, 21 nt, RNAi
uuaacaaucuaccuugugccg

SEQ ID NO: 52366 - DNA, 21 bp, homo sapiens
gatggaacacggctccatcat

SEQ ID NO: 52367 - RNA, 21 nt, RNAi
uggaacacggcuccaucauuu

SEQ ID NO: 52368 - RNA, 21 nt, RNAi
uuaccuugugccgagguagua

SEQ ID NO: 52369 - DNA, 21 bp, homo sapiens
gaacacggctccatcatcacc

SEQ ID NO: 52370 - RNA, 21 nt, RNAi
acacggcuccaucaucaccuu

SEQ ID NO: 52371 - RNA, 21 nt, RNAi
uuugugccgagguaguagugg

SEQ ID NO: 52372 - DNA, 21 bp, homo sapiens
gaagcctcgtggacgtaacat

SEQ ID NO: 52373 - RNA, 21 nt, RNAi
agccucguggacguaacauuu

SEQ ID NO: 52374 - RNA, 21 nt, RNAi
uuucggagcaccugcauugua

SEQ ID NO: 52375 - DNA, 21 bp, homo sapiens
gagctcgctgcgtataaggag

SEQ ID NO: 52376 - RNA, 21 nt, RNAi
gcucgcugcguauaaggaguu

SEQ ID NO: 52377 - RNA, 21 nt, RNAi
uucgagcgacgcauauuccuc

SEQ ID NO: 52378 - DNA, 21 bp, homo sapiens
gaggaagcaaacaccattgct

SEQ ID NO: 52379 - RNA, 21 nt, RNAi
ggaagcaaacaccauugcuuu

SEQ ID NO: 52380 - RNA, 21 nt, RNAi
uuccuucguuugugguaacga

SEQ ID NO: 52381 - DNA, 21 bp, homo sapiens
gaagcaaacaccattgctaag

SEQ ID NO: 52382 - RNA, 21 nt, RNAi
agcaaacaccauugcuaaguu

SEQ ID NO: 52383 - RNA, 21 nt, RNAi
uuucguuugugguaacgauuc

SEQ ID NO: 52384 - DNA, 21 bp, homo sapiens
gatctgctccagtgtctccag

SEQ ID NO: 52385 - RNA, 21 nt, RNAi
ucugcuccagugucuccaguu

SEQ ID NO: 52386 - RNA, 21 nt, RNAi
uuagacgaggucacagagguc

SEQ ID NO: 52387 - DNA, 21 bp, homo sapiens
gaggtgacagaggaagatcaa

SEQ ID NO: 52388 - RNA, 21 nt, RNAi
ggugacagaggaagaucaauu

SEQ ID NO: 52389 - RNA, 21 nt, RNAi
uuccacugucuccuucuaguu

SEQ ID NO: 52390 - DNA, 21 bp, homo sapiens
gacagaggaagatcaaggaag

SEQ ID NO: 52391 - RNA, 21 nt, RNAi
cagaggaagaucaaggaaguu

SEQ ID NO: 52392 - RNA, 21 nt, RNAi
uugucuccuucuaguuccuuc

SEQ ID NO: 52393 - DNA, 21 bp, homo sapiens
gaggaagatcaaggaaggatc

SEQ ID NO: 52394 - RNA, 21 nt, RNAi
ggaagaucaaggaaggaucuu

SEQ ID NO: 52395 - RNA, 21 nt, RNAi
uuccuucuaguuccuuccuag

SEQ ID NO: 52396 - DNA, 21 bp, homo sapiens
gaagatcaaggaaggatctgt

SEQ ID NO: 52397 - RNA, 21 nt, RNAi
agaucaaggaaggaucuguuu

SEQ ID NO: 52398 - RNA, 21 nt, RNAi
uuucuaguuccuuccuagaca

SEQ ID NO: 52399 - DNA, 21 bp, homo sapiens
gatcaaggaaggatctgtgtg

SEQ ID NO: 52400 - RNA, 21 nt, RNAi
ucaaggaaggaucuguguguu

SEQ ID NO: 52401 - RNA, 21 nt, RNAi
uuaguuccuuccuagacacac

SEQ ID NO: 52402 - DNA, 21 bp, homo sapiens
gaaggatctgtgtggtcattg

SEQ ID NO: 52403 - RNA, 21 nt, RNAi
aggaucuguguggucauuguu

SEQ ID NO: 52404 - RNA, 21 nt, RNAi
uuuccuagacacaccaguaac

SEQ ID NO: 52405 - DNA, 21 bp, homo sapiens
gatctgtgtggtcattgacct

SEQ ID NO: 52406 - RNA, 21 nt, RNAi
ucuguguggucauugaccuuu

SEQ ID NO: 52407 - RNA, 21 nt, RNAi
uuagacacaccaguaacugga

SEQ ID NO: 52408 - DNA, 21 bp, homo sapiens
gacttcatagtgcctatagag

SEQ ID NO: 52409 - RNA, 21 nt, RNAi
cuucauagugccuauagaguu

SEQ ID NO: 52410 - RNA, 21 nt, RNAi
uugaaguaucacggauaucuc

SEQ ID NO: 52411 - DNA, 21 bp, homo sapiens
gaccactcaccaggtgtatgt

SEQ ID NO: 52412 - RNA, 21 nt, RNAi
ccacucaccagguguauguuu

SEQ ID NO: 52413 - RNA, 21 nt, RNAi
uuggugagugguccacauaca

SEQ ID NO: 52414 - DNA, 21 bp, homo sapiens
gaggccttatgtggatgagtt

SEQ ID NO: 52415 - RNA, 21 nt, RNAi
ggccuuauguggaugaguuuu

SEQ ID NO: 52416 - RNA, 21 nt, RNAi
uuccggaauacaccuacucaa

SEQ ID NO: 52417 - DNA, 21 bp, homo sapiens
gatgagttcctgagacgcatg

SEQ ID NO: 52418 - RNA, 21 nt, RNAi
ugaguuccugagacgcauguu

SEQ ID NO: 52419 - RNA, 21 nt, RNAi
uuacucaaggacucugcguac

SEQ ID NO: 52420 - DNA, 21 bp, homo sapiens
gaactctttgaatgtgttctc

SEQ ID NO: 52421 - RNA, 21 nt, RNAi
acucuuugaauguguucucuu

SEQ ID NO: 52422 - RNA, 21 nt, RNAi
uuugagaaacuuacacaagag

SEQ ID NO: 52423 - DNA, 21 bp, homo sapiens
gaatgtgttctcttcactgcc

SEQ ID NO: 52424 - RNA, 21 nt, RNAi
auguguucucuucacugccuu

SEQ ID NO: 52425 - RNA, 21 nt, RNAi
uuuacacaagagaagugacgg

SEQ ID NO: 52426 - DNA, 21 bp, homo sapiens
gagtcttgcgtgttccaccag

SEQ ID NO: 52427 - RNA, 21 nt, RNAi
gucuugcguguuccaccaguu

SEQ ID NO: 52428 - RNA, 21 nt, RNAi
uucagaacgcacaaggugguc

SEQ ID NO: 52429 - DNA, 21 bp, homo sapiens
gacaactcgcctgcttcttac

SEQ ID NO: 52430 - RNA, 21 nt, RNAi
caacucgccugcuucuuacuu

SEQ ID NO: 52431 - RNA, 21 nt, RNAi
uuguugagcggacgaagaaug

SEQ ID NO: 52432 - DNA, 21 bp, homo sapiens
gagaatgcagtgcctgtgcag

SEQ ID NO: 52433 - RNA, 21 nt, RNAi
gaaugcagugccugugcaguu

SEQ ID NO: 52434 - RNA, 21 nt, RNAi
uucuuacgucacggacacguc

SEQ ID NO: 52435 - DNA, 21 bp, homo sapiens
gaatgcagtgcctgtgcagtc

SEQ ID NO: 52436 - RNA, 21 nt, RNAi
augcagugccugugcagucuu

SEQ ID NO: 52437 - RNA, 21 nt, RNAi
uuuacgucacggacacgucag

SEQ ID NO: 52438 - DNA, 21 bp, homo sapiens
gatgacatggcagacactgag

SEQ ID NO: 52439 - RNA, 21 nt, RNAi
ugacauggcagacacugaguu

SEQ ID NO: 52440 - RNA, 21 nt, RNAi
uuacuguaccgucugugacuc

SEQ ID NO: 52441 - DNA, 21 bp, homo sapiens
gacatggcagacactgagttg

SEQ ID NO: 52442 - RNA, 21 nt, RNAi
cauggcagacacugaguuguu

SEQ ID NO: 52443 - RNA, 21 nt, RNAi
uuguaccgucugugacucaac

SEQ ID NO: 52444 - DNA, 21 bp, homo sapiens
gacactgagttgctgaacctg

SEQ ID NO: 52445 - RNA, 21 nt, RNAi
cacugaguugcugaaccuguu

SEQ ID NO: 52446 - RNA, 21 nt, RNAi
uugugacucaacgacuuggac

SEQ ID NO: 52447 - DNA, 21 bp, homo sapiens
gagcggagcagaggacgtcta

SEQ ID NO: 52448 - RNA, 21 nt, RNAi
gcggagcagaggacgucuauu

SEQ ID NO: 52449 - RNA, 21 nt, RNAi
uucgccucgucuccugcagau

SEQ ID NO: 52450 - DNA, 21 bp, homo sapiens
gagcagaggacgtctacacca

SEQ ID NO: 52451 - RNA, 21 nt, RNAi
gcagaggacgucuacaccauu

SEQ ID NO: 52452 - RNA, 21 nt, RNAi
uucgucuccugcagauguggu

SEQ ID NO: 52453 - DNA, 21 bp, homo sapiens
gaggacgtctacaccagcctt

SEQ ID NO: 52454 - RNA, 21 nt, RNAi
ggacgucuacaccagccuuuu

SEQ ID NO: 52455 - RNA, 21 nt, RNAi
uuccugcagauguggucggaa

SEQ ID NO: 52456 - DNA, 21 bp, homo sapiens
gatcagcgtgacagagtagaa

SEQ ID NO: 52457 - RNA, 21 nt, RNAi
ucagcgugacagaguagaauu

SEQ ID NO: 52458 - RNA, 21 nt, RNAi
uuagucgcacugucucaucuu

SEQ ID NO: 52459 - DNA, 21 bp, homo sapiens
gacagagtagaagctggagtg

SEQ ID NO: 52460 - RNA, 21 nt, RNAi
cagaguagaagcuggaguguu

SEQ ID NO: 52461 - RNA, 21 nt, RNAi
uugucucaucuucgaccucac

SEQ ID NO: 52462 - DNA, 21 bp, homo sapiens
gagtagaagctggagtgcctc

SEQ ID NO: 52463 - RNA, 21 nt, RNAi
guagaagcuggagugccucuu

SEQ ID NO: 52464 - RNA, 21 nt, RNAi
uucaucuucgaccucacggag

SEQ ID NO: 52465 - DNA, 21 bp, homo sapiens
gaagctggagtgcctcaccac

SEQ ID NO: 52466 - RNA, 21 nt, RNAi
agcuggagugccucaccacuu

SEQ ID NO: 52467 - RNA, 21 nt, RNAi
uuucgaccucacggaguggug

SEQ ID NO: 52468 - DNA, 21 bp, homo sapiens
gaagtaactggaaagagcttt

SEQ ID NO: 52469 - RNA, 21 nt, RNAi
aguaacuggaaagagcuuuuu

SEQ ID NO: 52470 - RNA, 21 nt, RNAi
uuucauugaccuuucucgaaa

SEQ ID NO: 52471 - DNA, 21 bp, homo sapiens
gaaagagctttaggacagctt

SEQ ID NO: 52472 - RNA, 21 nt, RNAi
aagagcuuuaggacagcuuuu

SEQ ID NO: 52473 - RNA, 21 nt, RNAi
uuuucucgaaauccugucgaa

SEQ ID NO: 52474 - DNA, 21 bp, homo sapiens
gagctttaggacagcttagat

SEQ ID NO: 52475 - RNA, 21 nt, RNAi
gcuuuaggacagcuuagauuu

SEQ ID NO: 52476 - RNA, 21 nt, RNAi
uucgaaauccugucgaaucua

SEQ ID NO: 52477 - DNA, 21 bp, homo sapiens
gacagcttagatgccgagtgg

SEQ ID NO: 52478 - RNA, 21 nt, RNAi
cagcuuagaugccgagugguu

SEQ ID NO: 52479 - RNA, 21 nt, RNAi
uugucgaaucuacggcucacc

SEQ ID NO: 52480 - DNA, 21 bp, homo sapiens
gaatgccagaccaatgatacc

SEQ ID NO: 52481 - RNA, 21 nt, RNAi
augccagaccaaugauaccuu

SEQ ID NO: 52482 - RNA, 21 nt, RNAi
uuuacggucugguuacuaugg

SEQ ID NO: 52483 - DNA, 21 bp, homo sapiens
gagctacctgccgccaacttg

SEQ ID NO: 52484 - RNA, 21 nt, RNAi
gcuaccugccgccaacuuguu

SEQ ID NO: 52485 - RNA, 21 nt, RNAi
uucgauggacggcgguugaac

SEQ ID NO: 52486 - DNA, 21 bp, homo sapiens
gagatgtgtgtttgactgtga

SEQ ID NO: 52487 - RNA, 21 nt, RNAi
gauguguguuugacugugauu

SEQ ID NO: 52488 - RNA, 21 nt, RNAi
uucuacacacaaacugacacu

SEQ ID NO: 52489 - DNA, 21 bp, homo sapiens
gatgtgtgtttgactgtgaga

SEQ ID NO: 52490 - RNA, 21 nt, RNAi
uguguguuugacugugagauu

SEQ ID NO: 52491 - RNA, 21 nt, RNAi
uuacacacaaacugacacucu

SEQ ID NO: 52492 - DNA, 21 bp, homo sapiens
gactgtgagagagtgtgtgtt

SEQ ID NO: 52493 - RNA, 21 nt, RNAi
cugugagagaguguguguuuu

SEQ ID NO: 52494 - RNA, 21 nt, RNAi
uugacacucucucacacacaa

SEQ ID NO: 52495 - DNA, 21 bp, homo sapiens
gagagagtgtgtgtttgtgtg

SEQ ID NO: 52496 - RNA, 21 nt, RNAi
gagaguguguguuuguguguu

SEQ ID NO: 52497 - RNA, 21 nt, RNAi
uucucucacacacaaacacac

SEQ ID NO: 52498 - DNA, 21 bp, homo sapiens
gagagtgtgtgtttgtgtgtg

SEQ ID NO: 52499 - RNA, 21 nt, RNAi
gaguguguguuuguguguguu

SEQ ID NO: 52500 - RNA, 21 nt, RNAi
uucucacacacaaacacacac

SEQ ID NO: 52501 - DNA, 21 bp, homo sapiens
gagtgtgtgtttgtgtgtgtg

SEQ ID NO: 52502 - RNA, 21 nt, RNAi
guguguguuuguguguguguu

SEQ ID NO: 52503 - RNA, 21 nt, RNAi
uucacacacaaacacacacac

SEQ ID NO: 52504 - DNA, 21 bp, homo sapiens
gagaagctgaaagaccaagac

SEQ ID NO: 52505 - RNA, 21 nt, RNAi
gaagcugaaagaccaagacuu

SEQ ID NO: 52506 - RNA, 21 nt, RNAi
uucuucgacuuucugguucug

SEQ ID NO: 52507 - DNA, 21 bp, homo sapiens
gaagctgaaagaccaagactc

SEQ ID NO: 52508 - RNA, 21 nt, RNAi
agcugaaagaccaagacucuu

SEQ ID NO: 52509 - RNA, 21 nt, RNAi
uuucgacuuucugguucugag

SEQ ID NO: 52510 - DNA, 21 bp, homo sapiens
gatgaaractattgaagactc

SEQ ID NO: 52511 - RNA, 21 nt, RNAi
ugaaracuauugaagacucuu

SEQ ID NO: 52512 - RNA, 20 nt, RNAi
uuacuuugauaacuucugag

SEQ ID NO: 52513 - DNA, 21 bp, homo sapiens
gaaractattgaagactccat

SEQ ID NO: 52514 - RNA, 21 nt, RNAi
aracuauugaagacuccauuu

SEQ ID NO: 52515 - RNA, 20 nt, RNAi
uuuugauaacuucugaggua

SEQ ID NO: 52516 - DNA, 21 bp, homo sapiens
gaagactccattgccaaacca

SEQ ID NO: 52517 - RNA, 21 nt, RNAi
agacuccauugccaaaccauu

SEQ ID NO: 52518 - RNA, 21 nt, RNAi
uuucugagguaacgguuuggu

SEQ ID NO: 52519 - DNA, 21 bp, homo sapiens
gactccattgccaaaccatgg

SEQ ID NO: 52520 - RNA, 21 nt, RNAi
cuccauugccaaaccaugguu

SEQ ID NO: 52521 - RNA, 21 nt, RNAi
uugagguaacgguuugguacc

SEQ ID NO: 52522 - DNA, 21 bp, homo sapiens
gaaatccttctccagccagct

SEQ ID NO: 52523 - RNA, 21 nt, RNAi
aauccuucuccagccagcuuu

SEQ ID NO: 52524 - RNA, 21 nt, RNAi
uuuuaggaagaggucggucga

SEQ ID NO: 52525 - DNA, 21 bp, homo sapiens
gaagatgagaacttgtttcca

SEQ ID NO: 52526 - RNA, 21 nt, RNAi
agaugagaacuuguuuccauu

SEQ ID NO: 52527 - RNA, 21 nt, RNAi
uuucuacucuugaacaaaggu

SEQ ID NO: 52528 - DNA, 21 bp, homo sapiens
gatgagaacttgtttccagac

SEQ ID NO: 52529 - RNA, 21 nt, RNAi
ugagaacuuguuuccagacuu

SEQ ID NO: 52530 - RNA, 21 nt, RNAi
uuacucuugaacaaaggucug

SEQ ID NO: 52531 - DNA, 21 bp, homo sapiens
gagaacttgtttccagaccag

SEQ ID NO: 52532 - RNA, 21 nt, RNAi
gaacuuguuuccagaccaguu

SEQ ID NO: 52533 - RNA, 21 nt, RNAi
uucuugaacaaaggucugguc

SEQ ID NO: 52534 - DNA, 21 bp, homo sapiens
gaacttgtttccagaccagca

SEQ ID NO: 52535 - RNA, 21 nt, RNAi
acuuguuuccagaccagcauu

SEQ ID NO: 52536 - RNA, 21 nt, RNAi
uuugaacaaaggucuggucgu

SEQ ID NO: 52537 - DNA, 21 bp, homo sapiens
gaccagcatccagtggccatc

SEQ ID NO: 52538 - RNA, 21 nt, RNAi
ccagcauccaguggccaucuu

SEQ ID NO: 52539 - RNA, 21 nt, RNAi
uuggucguaggucaccgguag

SEQ ID NO: 52540 - DNA, 21 bp, homo sapiens
gaagaggacagataactgatt

SEQ ID NO: 52541 - RNA, 21 nt, RNAi
agaggacagauaacugauuuu

SEQ ID NO: 52542 - RNA, 21 nt, RNAi
uuucuccugucuauugacuaa

SEQ ID NO: 52543 - DNA, 21 bp, homo sapiens
gaggacagataactgatttcc

SEQ ID NO: 52544 - RNA, 21 nt, RNAi
ggacagauaacugauuuccuu

SEQ ID NO: 52545 - RNA, 21 nt, RNAi
uuccugucuauugacuaaagg

SEQ ID NO: 52546 - DNA, 21 bp, homo sapiens
gacagataactgatttccgtt

SEQ ID NO: 52547 - RNA, 21 nt, RNAi
cagauaacugauuuccguuuu

SEQ ID NO: 52548 - RNA, 21 nt, RNAi
uugucuauugacuaaaggcaa

SEQ ID NO: 52549 - DNA, 21 bp, homo sapiens
gataactgatttccgttcttt

SEQ ID NO: 52550 - RNA, 21 nt, RNAi
uaacugauuuccguucuuuuu

SEQ ID NO: 52551 - RNA, 21 nt, RNAi
uuauugacuaaaggcaagaaa

SEQ ID NO: 52552 - DNA, 21 bp, homo sapiens
gacaaatcctcaaagcgtgga

SEQ ID NO: 52553 - RNA, 21 nt, RNAi
caaauccucaaagcguggauu

SEQ ID NO: 52554 - RNA, 21 nt, RNAi
uuguuuaggaguuucgcaccu

SEQ ID NO: 52555 - DNA, 21 bp, homo sapiens
gatcatttccataagtctgct

SEQ ID NO: 52556 - RNA, 21 nt, RNAi
ucauuuccauaagucugcuuu

SEQ ID NO: 52557 - RNA, 21 nt, RNAi
uuaguaaagguauucagacga

SEQ ID NO: 52558 - DNA, 21 bp, homo sapiens
gattctctgctggtgctggtg

SEQ ID NO: 52559 - RNA, 21 nt, RNAi
uucucugcuggugcugguguu

SEQ ID NO: 52560 - RNA, 21 nt, RNAi
uuaagagacgaccacgaccac

SEQ ID NO: 52561 - DNA, 21 bp, homo sapiens
gacttctgttccaaaggctgg

SEQ ID NO: 52562 - RNA, 21 nt, RNAi
cuucuguuccaaaggcugguu

SEQ ID NO: 52563 - RNA, 21 nt, RNAi
uugaagacaagguuuccgacc

SEQ ID NO: 52564 - DNA, 21 bp, homo sapiens
gagctctgtctgttccagcct

SEQ ID NO: 52565 - RNA, 21 nt, RNAi
gcucugucuguuccagccuuu

SEQ ID NO: 52566 - RNA, 21 nt, RNAi
uucgagacagacaaggucgga

SEQ ID NO: 52567 - DNA, 21 bp, homo sapiens
gaatgagtgttcttgacatgt

SEQ ID NO: 52568 - RNA, 21 nt, RNAi
augaguguucuugacauguuu

SEQ ID NO: 52569 - RNA, 21 nt, RNAi
uuuacucacaagaacuguaca

SEQ ID NO: 52570 - DNA, 21 bp, homo sapiens
gagtgttcttgacatgtgaca

SEQ ID NO: 52571 - RNA, 21 nt, RNAi
guguucuugacaugugacauu

SEQ ID NO: 52572 - RNA, 21 nt, RNAi
uucacaagaacuguacacugu

SEQ ID NO: 52573 - DNA, 21 bp, homo sapiens
gacatgtgacagcctaatgcg

SEQ ID NO: 52574 - RNA, 21 nt, RNAi
caugugacagccuaaugcguu

SEQ ID NO: 52575 - RNA, 21 nt, RNAi
uuguacacugucggauuacgc

SEQ ID NO: 52576 - DNA, 21 bp, homo sapiens
gacagcctaatgcgcatgctt

SEQ ID NO: 52577 - RNA, 21 nt, RNAi
cagccuaaugcgcaugcuuuu

SEQ ID NO: 52578 - RNA, 21 nt, RNAi
uugucggauuacgcguacgaa

SEQ ID NO: 52579 - DNA, 21 bp, homo sapiens
gaggaagtgctgctgtaattg

SEQ ID NO: 52580 - RNA, 21 nt, RNAi
ggaagugcugcuguaauuguu

SEQ ID NO: 52581 - RNA, 21 nt, RNAi
uuccuucacgacgacauuaac

SEQ ID NO: 52582 - DNA, 21 bp, homo sapiens
gaggcaggtatcacaaagcat

SEQ ID NO: 52583 - RNA, 21 nt, RNAi
ggcagguaucacaaagcauuu

SEQ ID NO: 52584 - RNA, 21 nt, RNAi
uuccguccauaguguuucgua

SEQ ID NO: 52585 - DNA, 21 bp, homo sapiens
gatccagcctcaggaactaac

SEQ ID NO: 52586 - RNA, 21 nt, RNAi
uccagccucaggaacuaacuu

SEQ ID NO: 52587 - RNA, 21 nt, RNAi
uuaggucggaguccuugauug

SEQ ID NO: 52588 - DNA, 21 bp, homo sapiens
gagcagcagcttcgtgctctc

SEQ ID NO: 52589 - RNA, 21 nt, RNAi
gcagcagcuucgugcucucuu

SEQ ID NO: 52590 - RNA, 21 nt, RNAi
uucgucgucgaagcacgagag

SEQ ID NO: 52591 - DNA, 21 bp, homo sapiens
gaatcataaagtggaacagag

SEQ ID NO: 52592 - RNA, 21 nt, RNAi
aucauaaaguggaacagaguu

SEQ ID NO: 52593 - RNA, 21 nt, RNAi
uuuaguauuucaccuugucuc

SEQ ID NO: 52594 - DNA, 21 bp, homo sapiens
gaactcatgtgghcatttccg

SEQ ID NO: 52595 - RNA, 21 nt, RNAi
acucaugugghcauuuccguu

SEQ ID NO: 52596 - RNA, 20 nt, RNAi
uuugaguacaccguaaaggc

SEQ ID NO: 52597 - DNA, 21 bp, homo sapiens
gaaatatactgtctcttgaag

SEQ ID NO: 52598 - RNA, 21 nt, RNAi
aauauacugucucuugaaguu

SEQ ID NO: 52599 - RNA, 21 nt, RNAi
uuuuauaugacagagaacuuc

SEQ ID NO: 52600 - DNA, 21 bp, homo sapiens
gaaggaaagcaggagctcaga

SEQ ID NO: 52601 - RNA, 21 nt, RNAi
aggaaagcaggagcucagauu

SEQ ID NO: 52602 - RNA, 21 nt, RNAi
uuuccuuucguccucgagucu

SEQ ID NO: 52603 - DNA, 21 bp, homo sapiens
gaaagcaggagctcagactct

SEQ ID NO: 52604 - RNA, 21 nt, RNAi
aagcaggagcucagacucuuu

SEQ ID NO: 52605 - RNA, 21 nt, RNAi
uuuucguccucgagucugaga

SEQ ID NO: 52606 - DNA, 21 bp, homo sapiens
gagctcagactcttagagcca

SEQ ID NO: 52607 - RNA, 21 nt, RNAi
gcucagacucuuagagccauu

SEQ ID NO: 52608 - RNA, 21 nt, RNAi
uucgagucugagaaucucggu

SEQ ID NO: 52609 - DNA, 21 bp, homo sapiens
gactcttagagccagctgtgg

SEQ ID NO: 52610 - RNA, 21 nt, RNAi
cucuuagagccagcugugguu

SEQ ID NO: 52611 - RNA, 21 nt, RNAi
uugagaaucucggucgacacc

SEQ ID NO: 52612 - DNA, 21 bp, homo sapiens
gacctaggctgctatcctaat

SEQ ID NO: 52613 - RNA, 21 nt, RNAi
ccuaggcugcuauccuaauuu

SEQ ID NO: 52614 - RNA, 21 nt, RNAi
uuggauccgacgauaggauua

SEQ ID NO: 52615 - DNA, 21 bp, homo sapiens
gacaaatcttgtgccgtctag

SEQ ID NO: 52616 - RNA, 21 nt, RNAi
caaaucuugugccgucuaguu

SEQ ID NO: 52617 - RNA, 21 nt, RNAi
uuguuuagaacacggcagauc

SEQ ID NO: 52618 - DNA, 21 bp, homo sapiens
gactaaataagcaataagagg

SEQ ID NO: 52619 - RNA, 21 nt, RNAi
cuaaauaagcaauaagagguu

SEQ ID NO: 52620 - RNA, 21 nt, RNAi
uugauuuauucguuauucucc

SEQ ID NO: 52621 - DNA, 21 bp, homo sapiens
gaggctctaagctgactgagt

SEQ ID NO: 52622 - RNA, 21 nt, RNAi
ggcucuaagcugacugaguuu

SEQ ID NO: 52623 - RNA, 21 nt, RNAi
uuccgagauucgacugacuca

SEQ ID NO: 52624 - DNA, 21 bp, homo sapiens
gatctccatgtttctccagat

SEQ ID NO: 52625 - RNA, 21 nt, RNAi
ucuccauguuucuccagauuu

SEQ ID NO: 52626 - RNA, 21 nt, RNAi
uuagagguacaaagaggucua

SEQ ID NO: 52627 - DNA, 21 bp, homo sapiens
gatggcggaagagcatgtgcc

SEQ ID NO: 52628 - RNA, 21 nt, RNAi
uggcggaagagcaugugccuu

SEQ ID NO: 52629 - RNA, 21 nt, RNAi
uuaccgccuucucguacacgg

SEQ ID NO: 52630 - DNA, 21 bp, homo sapiens
gacttgtccaagtgcttggcg

SEQ ID NO: 52631 - RNA, 21 nt, RNAi
cuuguccaagugcuuggcguu

SEQ ID NO: 52632 - RNA, 21 nt, RNAi
uugaacagguucacgaaccgc

SEQ ID NO: 52633 - DNA, 21 bp, homo sapiens
gagaagctactcggccaaacc

SEQ ID NO: 52634 - RNA, 21 nt, RNAi
gaagcuacucggccaaaccuu

SEQ ID NO: 52635 - RNA, 21 nt, RNAi
uucuucgaugagccgguuugg

SEQ ID NO: 52636 - DNA, 21 bp, homo sapiens
gaagctactcggccaaaccta

SEQ ID NO: 52637 - RNA, 21 nt, RNAi
agcuacucggccaaaccuauu

SEQ ID NO: 52638 - RNA, 21 nt, RNAi
uuucgaugagccgguuuggau

SEQ ID NO: 52639 - DNA, 21 bp, homo sapiens
gaccagagccagcctagtcat

SEQ ID NO: 52640 - RNA, 21 nt, RNAi
ccagagccagccuagucauuu

SEQ ID NO: 52641 - RNA, 21 nt, RNAi
uuggucucggucggaucagua

SEQ ID NO: 52642 - DNA, 21 bp, homo sapiens
gagccagcctagtcattattt

SEQ ID NO: 52643 - RNA, 21 nt, RNAi
gccagccuagucauuauuuuu

SEQ ID NO: 52644 - RNA, 21 nt, RNAi
uucggucggaucaguaauaaa

SEQ ID NO: 52645 - DNA, 21 bp, homo sapiens
gaatcaggccagactcaattt

SEQ ID NO: 52646 - RNA, 21 nt, RNAi
aucaggccagacucaauuuuu

SEQ ID NO: 52647 - RNA, 21 nt, RNAi
uuuaguccggucugaguuaaa

SEQ ID NO: 52648 - DNA, 21 bp, homo sapiens
gaggcaataggccaccatgcc

SEQ ID NO: 52649 - RNA, 21 nt, RNAi
ggcaauaggccaccaugccuu

SEQ ID NO: 52650 - RNA, 21 nt, RNAi
uuccguuauccggugguacgg

SEQ ID NO: 52651 - DNA, 21 bp, homo sapiens
gaatctgcctacctgccaggt

SEQ ID NO: 52652 - RNA, 21 nt, RNAi
aucugccuaccugccagguuu

SEQ ID NO: 52653 - RNA, 21 nt, RNAi
uuuagacggauggacggucca

SEQ ID NO: 52654 - DNA, 21 bp, homo sapiens
gacacagtgtgtctctctgat

SEQ ID NO: 52655 - RNA, 21 nt, RNAi
cacagugugucucucugauuu

SEQ ID NO: 52656 - RNA, 21 nt, RNAi
uugugucacacagagagacua

SEQ ID NO: 52657 - DNA, 21 bp, homo sapiens
gagctttggacacaggaccag

SEQ ID NO: 52658 - RNA, 21 nt, RNAi
gcuuuggacacaggaccaguu

SEQ ID NO: 52659 - RNA, 21 nt, RNAi
uucgaaaccuguguccugguc

SEQ ID NO: 52660 - DNA, 21 bp, homo sapiens
gacacaggaccagtttggaaa

SEQ ID NO: 52661 - RNA, 21 nt, RNAi
cacaggaccaguuuggaaauu

SEQ ID NO: 52662 - RNA, 21 nt, RNAi
uuguguccuggucaaaccuuu

SEQ ID NO: 52663 - DNA, 21 bp, homo sapiens
gagaggttgagtgaatttgcc

SEQ ID NO: 52664 - RNA, 21 nt, RNAi
gagguugagugaauuugccuu

SEQ ID NO: 52665 - RNA, 21 nt, RNAi
uucuccaacucacuuaaacgg

SEQ ID NO: 52666 - DNA, 21 bp, homo sapiens
gaggttgagtgaatttgcctt

SEQ ID NO: 52667 - RNA, 21 nt, RNAi
gguugagugaauuugccuuuu

SEQ ID NO: 52668 - RNA, 21 nt, RNAi
uuccaacucacuuaaacggaa

SEQ ID NO: 52669 - DNA, 21 bp, homo sapiens
gagtgaatttgccttcagtta

SEQ ID NO: 52670 - RNA, 21 nt, RNAi
gugaauuugccuucaguuauu

SEQ ID NO: 52671 - RNA, 21 nt, RNAi
uucacuuaaacggaagucaau

SEQ ID NO: 52672 - DNA, 21 bp, homo sapiens
gaatttgccttcagttaacat

SEQ ID NO: 52673 - RNA, 21 nt, RNAi
auuugccuucaguuaacauuu

SEQ ID NO: 52674 - RNA, 21 nt, RNAi
uuuaaacggaagucaauugua

SEQ ID NO: 52675 - DNA, 21 bp, homo sapiens
gaccttctgtttagcttcctc

SEQ ID NO: 52676 - RNA, 21 nt, RNAi
ccuucuguuuagcuuccucuu

SEQ ID NO: 52677 - RNA, 21 nt, RNAi
uuggaagacaaaucgaaggag

SEQ ID NO: 52678 - DNA, 21 bp, homo sapiens
gaaatgtaaaggcagtctttc

SEQ ID NO: 52679 - RNA, 21 nt, RNAi
aauguaaaggcagucuuucuu

SEQ ID NO: 52680 - RNA, 21 nt, RNAi
uuuuacauuuccgucagaaag

SEQ ID NO: 52681 - DNA, 21 bp, homo sapiens
gaaatggatgctattctattc

SEQ ID NO: 52682 - RNA, 21 nt, RNAi
aauggaugcuauucuauucuu

SEQ ID NO: 52683 - RNA, 21 nt, RNAi
uuuuaccuacgauaagauaag

SEQ ID NO: 52684 - DNA, 21 bp, homo sapiens
gatgctattctattctgctgc

SEQ ID NO: 52685 - RNA, 21 nt, RNAi
ugcuauucuauucugcugcuu

SEQ ID NO: 52686 - RNA, 21 nt, RNAi
uuacgauaagauaagacgacg

SEQ ID NO: 52687 - DNA, 21 bp, homo sapiens
gaggcctcatttagaaagaaa

SEQ ID NO: 52688 - RNA, 21 nt, RNAi
ggccucauuuagaaagaaauu

SEQ ID NO: 52689 - RNA, 21 nt, RNAi
uuccggaguaaaucuuucuuu

SEQ ID NO: 52690 - DNA, 21 bp, homo sapiens
gattacttaaccactgctgtc

SEQ ID NO: 52691 - RNA, 21 nt, RNAi
uuacuuaaccacugcugucuu

SEQ ID NO: 52692 - RNA, 21 nt, RNAi
uuaaugaauuggugacgacag

SEQ ID NO: 52693 - DNA, 21 bp, homo sapiens
gattctgactaccttgcttac

SEQ ID NO: 52694 - RNA, 21 nt, RNAi
uucugacuaccuugcuuacuu

SEQ ID NO: 52695 - RNA, 21 nt, RNAi
uuaagacugauggaacgaaug

SEQ ID NO: 52696 - DNA, 21 bp, homo sapiens
gactaccttgcttacagattc

SEQ ID NO: 52697 - RNA, 21 nt, RNAi
cuaccuugcuuacagauucuu

SEQ ID NO: 52698 - RNA, 21 nt, RNAi
uugauggaacgaaugucuaag

SEQ ID NO: 52699 - DNA, 21 bp, homo sapiens
gaaatgcaggacgccattaag

SEQ ID NO: 52700 - RNA, 21 nt, RNAi
aaugcaggacgccauuaaguu

SEQ ID NO: 52701 - RNA, 21 nt, RNAi
uuuuacguccugcgguaauuc

SEQ ID NO: 52702 - DNA, 21 bp, homo sapiens
gacgccattaagtgtctgttt

SEQ ID NO: 52703 - RNA, 21 nt, RNAi
cgccauuaagugucuguuuuu

SEQ ID NO: 52704 - RNA, 21 nt, RNAi
uugcgguaauucacagacaaa

SEQ ID NO: 52705 - DNA, 21 bp, homo sapiens
tagatggaacacggctccatc

SEQ ID NO: 52706 - RNA, 21 nt, RNAi
gauggaacacggcuccaucuu

SEQ ID NO: 52707 - RNA, 21 nt, RNAi
uucuaccuugugccgagguag

SEQ ID NO: 52708 - DNA, 21 bp, homo sapiens
taagaagcctcgtggacgtaa

SEQ ID NO: 52709 - RNA, 21 nt, RNAi
agaagccucguggacguaauu

SEQ ID NO: 52710 - RNA, 21 nt, RNAi
uuucuucggagcaccugcauu

SEQ ID NO: 52711 - DNA, 21 bp, homo sapiens
tataaggaggaagcaaacacc

SEQ ID NO: 52712 - RNA, 21 nt, RNAi
uaaggaggaagcaaacaccuu

SEQ ID NO: 52713 - RNA, 21 nt, RNAi
uuauuccuccuucguuugugg

SEQ ID NO: 52714 - DNA, 21 bp, homo sapiens
taaggaggaagcaaacaccat

SEQ ID NO: 52715 - RNA, 21 nt, RNAi
aggaggaagcaaacaccauuu

SEQ ID NO: 52716 - RNA, 21 nt, RNAi
uuuccuccuucguuuguggua

SEQ ID NO: 52717 - DNA, 21 bp, homo sapiens
taagtcggatctgctccagtg

SEQ ID NO: 52718 - RNA, 21 nt, RNAi
agucggaucugcuccaguguu

SEQ ID NO: 52719 - RNA, 21 nt, RNAi
uuucagccuagacgaggucac

SEQ ID NO: 52720 - DNA, 21 bp, homo sapiens
tagctcctttaagccaatcaa

SEQ ID NO: 52721 - RNA, 21 nt, RNAi
gcuccuuuaagccaaucaauu

SEQ ID NO: 52722 - RNA, 21 nt, RNAi
uucgaggaaauucgguuaguu

SEQ ID NO: 52723 - DNA, 21 bp, homo sapiens
taagccaatcaacaatgctga

SEQ ID NO: 52724 - RNA, 21 nt, RNAi
agccaaucaacaaugcugauu

SEQ ID NO: 52725 - RNA, 21 nt, RNAi
uuucgguuaguuguuacgacu

SEQ ID NO: 52726 - DNA, 21 bp, homo sapiens
tagtgcctatagagattgagg

SEQ ID NO: 52727 - RNA, 21 nt, RNAi
gugccuauagagauugagguu

SEQ ID NO: 52728 - RNA, 21 nt, RNAi
uucacggauaucucuaacucc

SEQ ID NO: 52729 - DNA, 21 bp, homo sapiens
tatgtgctcaagaggccttat

SEQ ID NO: 52730 - RNA, 21 nt, RNAi
ugugcucaagaggccuuauuu

SEQ ID NO: 52731 - RNA, 21 nt, RNAi
uuacacgaguucuccggaaua

SEQ ID NO: 52732 - DNA, 21 bp, homo sapiens
tatgtggatgagttcctgaga

SEQ ID NO: 52733 - RNA, 21 nt, RNAi
uguggaugaguuccugagauu

SEQ ID NO: 52734 - RNA, 21 nt, RNAi
uuacaccuacucaaggacucu

SEQ ID NO: 52735 - DNA, 21 bp, homo sapiens
tattccgtgagtcttgcgtgt

SEQ ID NO: 52736 - RNA, 21 nt, RNAi
uuccgugagucuugcguguuu

SEQ ID NO: 52737 - RNA, 21 nt, RNAi
uuaaggcacucagaacgcaca

SEQ ID NO: 52738 - DNA, 21 bp, homo sapiens
tacgtcaaggacctcagccgc

SEQ ID NO: 52739 - RNA, 21 nt, RNAi
cgucaaggaccucagccgcuu

SEQ ID NO: 52740 - RNA, 21 nt, RNAi
uugcaguuccuggagucggcg

SEQ ID NO: 52741 - DNA, 21 bp, homo sapiens
tacgatcagcgtgacagagta

SEQ ID NO: 52742 - RNA, 21 nt, RNAi
cgaucagcgugacagaguauu

SEQ ID NO: 52743 - RNA, 21 nt, RNAi
uugcuagucgcacugucucau

SEQ ID NO: 52744 - DNA, 21 bp, homo sapiens
tagaagctggagtgcctcacc

SEQ ID NO: 52745 - RNA, 21 nt, RNAi
gaagcuggagugccucaccuu

SEQ ID NO: 52746 - RNA, 21 nt, RNAi
uucuucgaccucacggagugg

SEQ ID NO: 52747 - DNA, 21 bp, homo sapiens
taactggaaagagctttagga

SEQ ID NO: 52748 - RNA, 21 nt, RNAi
acuggaaagagcuuuaggauu

SEQ ID NO: 52749 - RNA, 21 nt, RNAi
uuugaccuuucucgaaauccu

SEQ ID NO: 52750 - DNA, 21 bp, homo sapiens
taggacagcttagatgccgag

SEQ ID NO: 52751 - RNA, 21 nt, RNAi
ggacagcuuagaugccgaguu

SEQ ID NO: 52752 - RNA, 21 nt, RNAi
uuccugucgaaucuacggcuc

SEQ ID NO: 52753 - DNA, 21 bp, homo sapiens
tacctgccgccaacttgttga

SEQ ID NO: 52754 - RNA, 21 nt, RNAi
ccugccgccaacuuguugauu

SEQ ID NO: 52755 - RNA, 21 nt, RNAi
uuggacggcgguugaacaacu

SEQ ID NO: 52756 - DNA, 21 bp, homo sapiens
tagcttgtctcctctcctgtc

SEQ ID NO: 52757 - RNA, 21 nt, RNAi
gcuugucuccucuccugucuu

SEQ ID NO: 52758 - RNA, 21 nt, RNAi
uucgaacagaggagaggacag

SEQ ID NO: 52759 - DNA, 21 bp, homo sapiens
taagagccactgagttgtgta

SEQ ID NO: 52760 - RNA, 21 nt, RNAi
agagccacugaguuguguauu

SEQ ID NO: 52761 - RNA, 21 nt, RNAi
uuucucggugacucaacacau

SEQ ID NO: 52762 - DNA, 21 bp, homo sapiens
tattgaagactccattgccaa

SEQ ID NO: 52763 - RNA, 21 nt, RNAi
uugaagacuccauugccaauu

SEQ ID NO: 52764 - RNA, 21 nt, RNAi
uuaacuucugagguaacgguu

SEQ ID NO: 52765 - DNA, 21 bp, homo sapiens
taaggcctatgccaaggataa

SEQ ID NO: 52766 - RNA, 21 nt, RNAi
aggccuaugccaaggauaauu

SEQ ID NO: 52767 - RNA, 21 nt, RNAi
uuuccggauacgguuccuauu

SEQ ID NO: 52768 - DNA, 21 bp, homo sapiens
tatgccaaggataaaggaagg

SEQ ID NO: 52769 - RNA, 21 nt, RNAi
ugccaaggauaaaggaagguu

SEQ ID NO: 52770 - RNA, 21 nt, RNAi
uuacgguuccuauuuccuucc

SEQ ID NO: 52771 - DNA, 21 bp, homo sapiens
tactccaggcatacacctttc

SEQ ID NO: 52772 - RNA, 21 nt, RNAi
cuccaggcauacaccuuucuu

SEQ ID NO: 52773 - RNA, 21 nt, RNAi
uugagguccguauguggaaag

SEQ ID NO: 52774 - DNA, 21 bp, homo sapiens
tacacctttctgaaatccttc

SEQ ID NO: 52775 - RNA, 21 nt, RNAi
caccuuucugaaauccuucuu

SEQ ID NO: 52776 - RNA, 21 nt, RNAi
uuguggaaagacuuuaggaag

SEQ ID NO: 52777 - DNA, 21 bp, homo sapiens
tatgcttgcctccggctgagt

SEQ ID NO: 52778 - RNA, 21 nt, RNAi
ugcuugccuccggcugaguuu

SEQ ID NO: 52779 - RNA, 21 nt, RNAi
uuacgaacggaggccgacuca

SEQ ID NO: 52780 - DNA, 21 bp, homo sapiens
tagccatagtctcaaacctgt

SEQ ID NO: 52781 - RNA, 21 nt, RNAi
gccauagucucaaaccuguuu

SEQ ID NO: 52782 - RNA, 21 nt, RNAi
uucgguaucagaguuuggaca

SEQ ID NO: 52783 - DNA, 21 bp, homo sapiens
taccgagctctgtctgttcca

SEQ ID NO: 52784 - RNA, 21 nt, RNAi
ccgagcucugucuguuccauu

SEQ ID NO: 52785 - RNA, 21 nt, RNAi
uuggcucgagacagacaaggu

SEQ ID NO: 52786 - DNA, 21 bp, homo sapiens
taatgcgcatgctttctgcct

SEQ ID NO: 52787 - RNA, 21 nt, RNAi
augcgcaugcuuucugccuuu

SEQ ID NO: 52788 - RNA, 21 nt, RNAi
uuuacgcguacgaaagacgga

SEQ ID NO: 52789 - DNA, 21 bp, homo sapiens
taaagtcatcacgaaatggaa

SEQ ID NO: 52790 - RNA, 21 nt, RNAi
aagucaucacgaaauggaauu

SEQ ID NO: 52791 - RNA, 21 nt, RNAi
uuuucaguagugcuuuaccuu

SEQ ID NO: 52792 - DNA, 21 bp, homo sapiens
taagaggaagtgctgctgtaa

SEQ ID NO: 52793 - RNA, 21 nt, RNAi
agaggaagugcugcuguaauu

SEQ ID NO: 52794 - RNA, 21 nt, RNAi
uuucuccuucacgacgacauu

SEQ ID NO: 52795 - DNA, 21 bp, homo sapiens
tagatccagcctcaggaacta

SEQ ID NO: 52796 - RNA, 21 nt, RNAi
gauccagccucaggaacuauu

SEQ ID NO: 52797 - RNA, 21 nt, RNAi
uucuaggucggaguccuugau

SEQ ID NO: 52798 - DNA, 21 bp, homo sapiens
tagagcagcagcttcgtgctc

SEQ ID NO: 52799 - RNA, 21 nt, RNAi
gagcagcagcuucgugcucuu

SEQ ID NO: 52800 - RNA, 21 nt, RNAi
uucucgucgucgaagcacgag

SEQ ID NO: 52801 - DNA, 21 bp, homo sapiens
tagcgttgtggtgccaccttc

SEQ ID NO: 52802 - RNA, 21 nt, RNAi
gcguuguggugccaccuucuu

SEQ ID NO: 52803 - RNA, 21 nt, RNAi
uucgcaacaccacgguggaag

SEQ ID NO: 52804 - DNA, 21 bp, homo sapiens
tataaggccttgtctttctct

SEQ ID NO: 52805 - RNA, 21 nt, RNAi
uaaggccuugucuuucucuuu

SEQ ID NO: 52806 - RNA, 21 nt, RNAi
uuauuccggaacagaaagaga

SEQ ID NO: 52807 - DNA, 21 bp, homo sapiens
taaggccttgtctttctcttt

SEQ ID NO: 52808 - RNA, 21 nt, RNAi
aggccuugucuuucucuuuuu

SEQ ID NO: 52809 - RNA, 21 nt, RNAi
uuuccggaacagaaagagaaa

SEQ ID NO: 52810 - DNA, 21 bp, homo sapiens
tagccagaaatatactgtctc

SEQ ID NO: 52811 - RNA, 21 nt, RNAi
gccagaaauauacugucucuu

SEQ ID NO: 52812 - RNA, 21 nt, RNAi
uucggucuuuauaugacagag

SEQ ID NO: 52813 - DNA, 21 bp, homo sapiens
tatactgtctcttgaaggaaa

SEQ ID NO: 52814 - RNA, 21 nt, RNAi
uacugucucuugaaggaaauu

SEQ ID NO: 52815 - RNA, 21 nt, RNAi
uuaugacagagaacuuccuuu

SEQ ID NO: 52816 - DNA, 21 bp, homo sapiens
tactgtctcttgaaggaaagc

SEQ ID NO: 52817 - RNA, 21 nt, RNAi
cugucucuugaaggaaagcuu

SEQ ID NO: 52818 - RNA, 21 nt, RNAi
uugacagagaacuuccuuucg

SEQ ID NO: 52819 - DNA, 21 bp, homo sapiens
tagagccagctgtggcttcgg

SEQ ID NO: 52820 - RNA, 21 nt, RNAi
gagccagcuguggcuucgguu

SEQ ID NO: 52821 - RNA, 21 nt, RNAi
uucucggucgacaccgaagcc

SEQ ID NO: 52822 - DNA, 21 bp, homo sapiens
taggctgctatcctaatattg

SEQ ID NO: 52823 - RNA, 21 nt, RNAi
ggcugcuauccuaauauuguu

SEQ ID NO: 52824 - RNA, 21 nt, RNAi
uuccgacgauaggauuauaac

SEQ ID NO: 52825 - DNA, 21 bp, homo sapiens
taaataagcaataagaggctc

SEQ ID NO: 52826 - RNA, 21 nt, RNAi
aauaagcaauaagaggcucuu

SEQ ID NO: 52827 - RNA, 21 nt, RNAi
uuuuauucguuauucuccgag

SEQ ID NO: 52828 - DNA, 21 bp, homo sapiens
taagcaataagaggctctaag

SEQ ID NO: 52829 - RNA, 21 nt, RNAi
agcaauaagaggcucuaaguu

SEQ ID NO: 52830 - RNA, 21 nt, RNAi
uuucguuauucuccgagauuc

SEQ ID NO: 52831 - DNA, 21 bp, homo sapiens
taagaggctctaagctgactg

SEQ ID NO: 52832 - RNA, 21 nt, RNAi
agaggcucuaagcugacuguu

SEQ ID NO: 52833 - RNA, 21 nt, RNAi
uuucuccgagauucgacugac

SEQ ID NO: 52834 - DNA, 21 bp, homo sapiens
taagctgactgagttgcaagg

SEQ ID NO: 52835 - RNA, 21 nt, RNAi
agcugacugaguugcaagguu

SEQ ID NO: 52836 - RNA, 21 nt, RNAi
uuucgacugacucaacguucc

SEQ ID NO: 52837 - DNA, 21 bp, homo sapiens
taacagacttgtccaagtgct

SEQ ID NO: 52838 - RNA, 21 nt, RNAi
acagacuuguccaagugcuuu

SEQ ID NO: 52839 - RNA, 21 nt, RNAi
uuugucugaacagguucacga

SEQ ID NO: 52840 - DNA, 21 bp, homo sapiens
tactcggccaaacctagccag

SEQ ID NO: 52841 - RNA, 21 nt, RNAi
cucggccaaaccuagccaguu

SEQ ID NO: 52842 - RNA, 21 nt, RNAi
uugagccgguuuggaucgguc

SEQ ID NO: 52843 - DNA, 21 bp, homo sapiens
taggccaccatgcctggtcag

SEQ ID NO: 52844 - RNA, 21 nt, RNAi
ggccaccaugccuggucaguu

SEQ ID NO: 52845 - RNA, 21 nt, RNAi
uuccggugguacggaccaguc

SEQ ID NO: 52846 - DNA, 21 bp, homo sapiens
tacctgccaggttcagttctt

SEQ ID NO: 52847 - RNA, 21 nt, RNAi
ccugccagguucaguucuuuu

SEQ ID NO: 52848 - RNA, 21 nt, RNAi
uuggacgguccaagucaagaa

SEQ ID NO: 52849 - DNA, 21 bp, homo sapiens
tactagagaggttgagtgaat

SEQ ID NO: 52850 - RNA, 21 nt, RNAi
cuagagagguugagugaauuu

SEQ ID NO: 52851 - RNA, 21 nt, RNAi
uugaucucuccaacucacuua

SEQ ID NO: 52852 - DNA, 21 bp, homo sapiens
tagagaggttgagtgaatttg

SEQ ID NO: 52853 - RNA, 21 nt, RNAi
gagagguugagugaauuuguu

SEQ ID NO: 52854 - RNA, 21 nt, RNAi
uucucuccaacucacuuaaac

SEQ ID NO: 52855 - DNA, 21 bp, homo sapiens
tataaactcacctctggtaac

SEQ ID NO: 52856 - RNA, 21 nt, RNAi
uaaacucaccucugguaacuu

SEQ ID NO: 52857 - RNA, 21 nt, RNAi
uuauuugaguggagaccauug

SEQ ID NO: 52858 - DNA, 21 bp, homo sapiens
taaactcacctctggtaacag

SEQ ID NO: 52859 - RNA, 21 nt, RNAi
aacucaccucugguaacaguu

SEQ ID NO: 52860 - RNA, 21 nt, RNAi
uuuugaguggagaccauuguc

SEQ ID NO: 52861 - DNA, 21 bp, homo sapiens
tacctgttcctgaggcctcat

SEQ ID NO: 52862 - RNA, 21 nt, RNAi
ccuguuccugaggccucauuu

SEQ ID NO: 52863 - RNA, 21 nt, RNAi
uuggacaaggacuccggagua

SEQ ID NO: 52864 - DNA, 21 bp, homo sapiens
tagccaggccaagtatatgag

SEQ ID NO: 52865 - RNA, 21 nt, RNAi
gccaggccaaguauaugaguu

SEQ ID NO: 52866 - RNA, 21 nt, RNAi
uucgguccgguucauauacuc

SEQ ID NO: 52867 - DNA, 21 bp, homo sapiens
tatatgagaaaggtaagtcca

SEQ ID NO: 52868 - RNA, 21 nt, RNAi
uaugagaaagguaaguccauu

SEQ ID NO: 52869 - RNA, 21 nt, RNAi
uuauacucuuuccauucaggu

SEQ ID NO: 52870 - DNA, 21 bp, homo sapiens
tatgagaaaggtaagtccatt

SEQ ID NO: 52871 - RNA, 21 nt, RNAi
ugagaaagguaaguccauuuu

SEQ ID NO: 52872 - RNA, 21 nt, RNAi
uuacucuuuccauucagguaa

SEQ ID NO: 52873 - DNA, 21 bp, homo sapiens
tatcatgttccatttcgtgcc

SEQ ID NO: 52874 - RNA, 21 nt, RNAi
ucauguuccauuucgugccuu

SEQ ID NO: 52875 - RNA, 21 nt, RNAi
uuaguacaagguaaagcacgg

SEQ ID NO: 52876 - DNA, 21 bp, homo sapiens
taccttgcttacagattcatg

SEQ ID NO: 52877 - RNA, 21 nt, RNAi
ccuugcuuacagauucauguu

SEQ ID NO: 52878 - RNA, 21 nt, RNAi
uuggaacgaaugucuaaguac

SEQ ID NO: 52879 - DNA, 21 bp, homo sapiens
aagtcctctcctaagaagcct

SEQ ID NO: 52880 - RNA, 21 nt, RNAi
guccucuccuaagaagccuuu

SEQ ID NO: 52881 - RNA, 21 nt, RNAi
uucaggagaggauucuucgga

SEQ ID NO: 52882 - DNA, 21 bp, homo sapiens
aatgctgacttcatagtgcct

SEQ ID NO: 52883 - RNA, 21 nt, RNAi
ugcugacuucauagugccuuu

SEQ ID NO: 52884 - RNA, 21 nt, RNAi
uuacgacugaaguaucacgga

SEQ ID NO: 52885 - DNA, 21 bp, homo sapiens
aagaggccttatgtggatgag

SEQ ID NO: 52886 - RNA, 21 nt, RNAi
gaggccuuauguggaugaguu

SEQ ID NO: 52887 - RNA, 21 nt, RNAi
uucuccggaauacaccuacuc

SEQ ID NO: 52888 - DNA, 21 bp, homo sapiens
cactgagctcgctgcgtataa

SEQ ID NO: 52889 - RNA, 21 nt, RNAi
cugagcucgcugcguauaauu

SEQ ID NO: 52890 - RNA, 21 nt, RNAi
uugacucgagcgacgcauauu

SEQ ID NO: 52891 - DNA, 21 bp, homo sapiens
cattgctaagtcggatctgct

SEQ ID NO: 52892 - RNA, 21 nt, RNAi
uugcuaagucggaucugcuuu

SEQ ID NO: 52893 - RNA, 21 nt, RNAi
uuaacgauucagccuagacga

SEQ ID NO: 52894 - DNA, 21 bp, homo sapiens
cagtgtctccagtaccagttc

SEQ ID NO: 52895 - RNA, 21 nt, RNAi
gugucuccaguaccaguucuu

SEQ ID NO: 52896 - RNA, 21 nt, RNAi
uucacagaggucauggucaag

SEQ ID NO: 52897 - DNA, 21 bp, homo sapiens
catagtgcctatagagattga

SEQ ID NO: 52898 - RNA, 21 nt, RNAi
uagugccuauagagauugauu

SEQ ID NO: 52899 - RNA, 21 nt, RNAi
uuaucacggauaucucuaacu

SEQ ID NO: 52900 - DNA, 21 bp, homo sapiens
caagaggccttatgtggatga

SEQ ID NO: 52901 - RNA, 21 nt, RNAi
agaggccuuauguggaugauu

SEQ ID NO: 52902 - RNA, 21 nt, RNAi
uuucuccggaauacaccuacu

SEQ ID NO: 52903 - DNA, 21 bp, homo sapiens
cagtcctggtttgatgacatg

SEQ ID NO: 52904 - RNA, 21 nt, RNAi
guccugguuugaugacauguu

SEQ ID NO: 52905 - RNA, 21 nt, RNAi
uucaggaccaaacuacuguac

SEQ ID NO: 52906 - DNA, 21 bp, homo sapiens
gaagcctcgtggacgtaacat

SEQ ID NO: 52907 - RNA, 21 nt, RNAi
agccucguggacguaacauuu

SEQ ID NO: 52908 - RNA, 21 nt, RNAi
uuucggagcaccugcauugua

SEQ ID NO: 52909 - DNA, 21 bp, homo sapiens
gaccactcaccaggtgtatgt

SEQ ID NO: 52910 - RNA, 21 nt, RNAi
ccacucaccagguguauguuu

SEQ ID NO: 52911 - RNA, 21 nt, RNAi
uuggugagugguccacauaca

SEQ ID NO: 52912 - DNA, 21 bp, homo sapiens
gatgagttcctgagacgcatg

SEQ ID NO: 52913 - RNA, 21 nt, RNAi
ugaguuccugagacgcauguu

SEQ ID NO: 52914 - RNA, 21 nt, RNAi
uuacucaaggacucugcguac

SEQ ID NO: 52915 - DNA, 21 bp, homo sapiens
gacatggcagacactgagttg

SEQ ID NO: 52916 - RNA, 21 nt, RNAi
cauggcagacacugaguuguu

SEQ ID NO: 52917 - RNA, 21 nt, RNAi
uuguaccgucugugacucaac

SEQ ID NO: 52918 - DNA, 21 bp, homo sapiens
taagaagcctcgtggacgtaa

SEQ ID NO: 52919 - RNA, 21 nt, RNAi
agaagccucguggacguaauu

SEQ ID NO: 52920 - RNA, 21 nt, RNAi
uuucuucggagcaccugcauu

SEQ ID NO: 52921 - DNA, 21 bp, homo sapiens
tagtgcctatagagattgagg

SEQ ID NO: 52922 - RNA, 21 nt, RNAi
gugccuauagagauugagguu

SEQ ID NO: 52923 - RNA, 21 nt, RNAi
uucacggauaucucuaacucc

SEQ ID NO: 52924 - DNA, 21 bp, homo sapiens
tattccgtgagtcttgcgtgt

SEQ ID NO: 52925 - RNA, 21 nt, RNAi
uuccgugagucuugcguguuu

SEQ ID NO: 52926 - RNA, 21 nt, RNAi
uuaaggcacucagaacgcaca

SEQ ID NO: 52927 - DNA, 21 bp, homo sapiens
aaaccggcatgcggtgtactg

SEQ ID NO: 52928 - RNA, 21 nt, RNAi
accggcaugcgguguacuguu

SEQ ID NO: 52929 - RNA, 21 nt, RNAi
uuuggccguacgccacaugac

SEQ ID NO: 52930 - DNA, 21 bp, homo sapiens
aaccggcatgcggtgtactgg

SEQ ID NO: 52931 - RNA, 21 nt, RNAi
ccggcaugcgguguacugguu

SEQ ID NO: 52932 - RNA, 21 nt, RNAi
uuggccguacgccacaugacc

SEQ ID NO: 52933 - DNA, 21 bp, homo sapiens
aacagctccaaccagcacctg

SEQ ID NO: 52934 - RNA, 21 nt, RNAi
cagcuccaaccagcaccuguu

SEQ ID NO: 52935 - RNA, 21 nt, RNAi
uugucgagguuggucguggac

SEQ ID NO: 52936 - DNA, 21 bp, homo sapiens
aacgtgaacgactatctggat

SEQ ID NO: 52937 - RNA, 21 nt, RNAi
cgugaacgacuaucuggauuu

SEQ ID NO: 52938 - RNA, 21 nt, RNAi
uugcacuugcugauagaccua

SEQ ID NO: 52939 - DNA, 21 bp, homo sapiens
aacgactatctggatatttac

SEQ ID NO: 52940 - RNA, 21 nt, RNAi
cgacuaucuggauauuuacuu

SEQ ID NO: 52941 - RNA, 21 nt, RNAi
uugcugauagaccuauaaaug

SEQ ID NO: 52942 - DNA, 21 bp, homo sapiens
aacggctaccgcacctgcaac

SEQ ID NO: 52943 - RNA, 21 nt, RNAi
cggcuaccgcaccugcaacuu

SEQ ID NO: 52944 - RNA, 21 nt, RNAi
uugccgauggcguggacguug

SEQ ID NO: 52945 - DNA, 21 bp, homo sapiens
aagttctcggagaagttccag

SEQ ID NO: 52946 - RNA, 21 nt, RNAi
guucucggagaaguuccaguu

SEQ ID NO: 52947 - RNA, 21 nt, RNAi
uucaagagccucuucaagguc

SEQ ID NO: 52948 - DNA, 21 bp, homo sapiens
aagttccagcgctacagcgcc

SEQ ID NO: 52949 - RNA, 21 nt, RNAi
guuccagcgcuacagcgccuu

SEQ ID NO: 52950 - RNA, 21 nt, RNAi
uucaaggucgcgaugucgcgg

SEQ ID NO: 52951 - DNA, 21 bp, homo sapiens
aacctgcactggaagtgtctg

SEQ ID NO: 52952 - RNA, 21 nt, RNAi
ccugcacuggaagugucuguu

SEQ ID NO: 52953 - RNA, 21 nt, RNAi
uuggacgugaccuucacagac

SEQ ID NO: 52954 - DNA, 21 bp, homo sapiens
aagtgtctgaggatgaaggtg

SEQ ID NO: 52955 - RNA, 21 nt, RNAi
gugucugaggaugaagguguu

SEQ ID NO: 52956 - RNA, 21 nt, RNAi
uucacagacuccuacuuccac

SEQ ID NO: 52957 - DNA, 21 bp, homo sapiens
aaggtgttcgtctgctgcgcc

SEQ ID NO: 52958 - RNA, 21 nt, RNAi
gguguucgucugcugcgccuu

SEQ ID NO: 52959 - RNA, 21 nt, RNAi
uuccacaagcagacgacgcgg

SEQ ID NO: 52960 - DNA, 21 bp, homo sapiens
aatgtgaagatcaacgtgctg

SEQ ID NO: 52961 - RNA, 21 nt, RNAi
ugugaagaucaacgugcuguu

SEQ ID NO: 52962 - RNA, 21 nt, RNAi
uuacacuucuaguugcacgac

SEQ ID NO: 52963 - DNA, 21 bp, homo sapiens
aagatcaacgtgctggaagac

SEQ ID NO: 52964 - RNA, 21 nt, RNAi
gaucaacgugcuggaagacuu

SEQ ID NO: 52965 - RNA, 21 nt, RNAi
uucuaguugcacgaccuucug

SEQ ID NO: 52966 - DNA, 21 bp, homo sapiens
aacgtgctggaagactttgag

SEQ ID NO: 52967 - RNA, 21 nt, RNAi
cgugcuggaagacuuugaguu

SEQ ID NO: 52968 - RNA, 21 nt, RNAi
uugcacgaccuucugaaacuc

SEQ ID NO: 52969 - DNA, 21 bp, homo sapiens
aagcttgagaagagcatcagc

SEQ ID NO: 52970 - RNA, 21 nt, RNAi
gcuugagaagagcaucagcuu

SEQ ID NO: 52971 - RNA, 21 nt, RNAi
uucgaacucuucucguagucg

SEQ ID NO: 52972 - DNA, 21 bp, homo sapiens
aatgtttggtaccaaacttgg

SEQ ID NO: 52973 - RNA, 21 nt, RNAi
uguuugguaccaaacuugguu

SEQ ID NO: 52974 - RNA, 21 nt, RNAi
uuacaaaccaugguuugaacc

SEQ ID NO: 52975 - DNA, 21 bp, homo sapiens
aaaccaagtttacaagtagac

SEQ ID NO: 52976 - RNA, 21 nt, RNAi
accaaguuuacaaguagacuu

SEQ ID NO: 52977 - RNA, 21 nt, RNAi
uuugguucaaauguucaucug

SEQ ID NO: 52978 - DNA, 21 bp, homo sapiens
aaccaagtttacaagtagaca

SEQ ID NO: 52979 - RNA, 21 nt, RNAi
ccaaguuuacaaguagacauu

SEQ ID NO: 52980 - RNA, 21 nt, RNAi
uugguucaaauguucaucugu

SEQ ID NO: 52981 - DNA, 21 bp, homo sapiens
aatgtacagacagacagagtc

SEQ ID NO: 52982 - RNA, 21 nt, RNAi
uguacagacagacagagucuu

SEQ ID NO: 52983 - RNA, 21 nt, RNAi
uuacaugucugucugucucag

SEQ ID NO: 52984 - DNA, 21 bp, homo sapiens
aagacaggacctatgcaacgc

SEQ ID NO: 52985 - RNA, 21 nt, RNAi
gacaggaccuaugcaacgcuu

SEQ ID NO: 52986 - RNA, 21 nt, RNAi
uucuguccuggauacguugcg

SEQ ID NO: 52987 - DNA, 21 bp, homo sapiens
aagtgctttggctgtgacttt

SEQ ID NO: 52988 - RNA, 21 nt, RNAi
gugcuuuggcugugacuuuuu

SEQ ID NO: 52989 - RNA, 21 nt, RNAi
uucacgaaaccgacacugaaa

SEQ ID NO: 52990 - DNA, 21 bp, homo sapiens
catgcggtgtactggaacagc

SEQ ID NO: 52991 - RNA, 21 nt, RNAi
ugcgguguacuggaacagcuu

SEQ ID NO: 52992 - RNA, 21 nt, RNAi
uuacgccacaugaccuugucg

SEQ ID NO: 52993 - DNA, 21 bp, homo sapiens
caccgtgcaggtgaacgtgaa

SEQ ID NO: 52994 - RNA, 21 nt, RNAi
ccgugcaggugaacgugaauu

SEQ ID NO: 52995 - RNA, 21 nt, RNAi
uuggcacguccacuugcacuu

SEQ ID NO: 52996 - DNA, 21 bp, homo sapiens
caggtgaacgtgaacgactat

SEQ ID NO: 52997 - RNA, 21 nt, RNAi
ggugaacgugaacgacuauuu

SEQ ID NO: 52998 - RNA, 21 nt, RNAi
uuccacuugcacuugcugaua

SEQ ID NO: 52999 - DNA, 21 bp, homo sapiens
cagagcagtacgtgctgtaca

SEQ ID NO: 53000 - RNA, 21 nt, RNAi
gagcaguacgugcuguacauu

SEQ ID NO: 53001 - RNA, 21 nt, RNAi
uucucgucaugcacgacaugu

SEQ ID NO: 53002 - DNA, 21 bp, homo sapiens
cagtacgtgctgtacatggtg

SEQ ID NO: 53003 - RNA, 21 nt, RNAi
guacgugcuguacaugguguu

SEQ ID NO: 53004 - RNA, 21 nt, RNAi
uucaugcacgacauguaccac

SEQ ID NO: 53005 - DNA, 21 bp, homo sapiens
catggtgagccgcaacggcta

SEQ ID NO: 53006 - RNA, 21 nt, RNAi
uggugagccgcaacggcuauu

SEQ ID NO: 53007 - RNA, 21 nt, RNAi
uuaccacucggcguugccgau

SEQ ID NO: 53008 - DNA, 21 bp, homo sapiens
caacggctaccgcacctgcaa

SEQ ID NO: 53009 - RNA, 21 nt, RNAi
acggcuaccgcaccugcaauu

SEQ ID NO: 53010 - RNA, 21 nt, RNAi
uuugccgauggcguggacguu

SEQ ID NO: 53011 - DNA, 21 bp, homo sapiens
catcaagttctcggagaagtt

SEQ ID NO: 53012 - RNA, 21 nt, RNAi
ucaaguucucggagaaguuuu

SEQ ID NO: 53013 - RNA, 21 nt, RNAi
uuaguucaagagccucuucaa

SEQ ID NO: 53014 - DNA, 21 bp, homo sapiens
caagttctcggagaagttcca

SEQ ID NO: 53015 - RNA, 21 nt, RNAi
aguucucggagaaguuccauu

SEQ ID NO: 53016 - RNA, 21 nt, RNAi
uuucaagagccucuucaaggu

SEQ ID NO: 53017 - DNA, 21 bp, homo sapiens
cagcgctacagcgccttctct

SEQ ID NO: 53018 - RNA, 21 nt, RNAi
gcgcuacagcgccuucucuuu

SEQ ID NO: 53019 - RNA, 21 nt, RNAi
uucgcgaugucgcggaagaga

SEQ ID NO: 53020 - DNA, 21 bp, homo sapiens
cacgagtactactacatctcc

SEQ ID NO: 53021 - RNA, 21 nt, RNAi
cgaguacuacuacaucuccuu

SEQ ID NO: 53022 - RNA, 21 nt, RNAi
uugcucaugaugauguagagg

SEQ ID NO: 53023 - DNA, 21 bp, homo sapiens
cactcacaacctgcactggaa

SEQ ID NO: 53024 - RNA, 21 nt, RNAi
cucacaaccugcacuggaauu

SEQ ID NO: 53025 - RNA, 21 nt, RNAi
uugaguguuggacgugaccuu

SEQ ID NO: 53026 - DNA, 21 bp, homo sapiens
cacaacctgcactggaagtgt

SEQ ID NO: 53027 - RNA, 21 nt, RNAi
caaccugcacuggaaguguuu

SEQ ID NO: 53028 - RNA, 21 nt, RNAi
uuguuggacgugaccuucaca

SEQ ID NO: 53029 - DNA, 21 bp, homo sapiens
caacctgcactggaagtgtct

SEQ ID NO: 53030 - RNA, 21 nt, RNAi
accugcacuggaagugucuuu

SEQ ID NO: 53031 - RNA, 21 nt, RNAi
uuuggacgugaccuucacaga

SEQ ID NO: 53032 - DNA, 21 bp, homo sapiens
cactggaagtgtctgaggatg

SEQ ID NO: 53033 - RNA, 21 nt, RNAi
cuggaagugucugaggauguu

SEQ ID NO: 53034 - RNA, 21 nt, RNAi
uugaccuucacagacuccuac

SEQ ID NO: 53035 - DNA, 21 bp, homo sapiens
caatgtgaagatcaacgtgct

SEQ ID NO: 53036 - RNA, 21 nt, RNAi
augugaagaucaacgugcuuu

SEQ ID NO: 53037 - RNA, 21 nt, RNAi
uuuacacuucuaguugcacga

SEQ ID NO: 53038 - DNA, 21 bp, homo sapiens
caacgtgctggaagactttga

SEQ ID NO: 53039 - RNA, 21 nt, RNAi
acgugcuggaagacuuugauu

SEQ ID NO: 53040 - RNA, 21 nt, RNAi
uuugcacgaccuucugaaacu

SEQ ID NO: 53041 - DNA, 21 bp, homo sapiens
caagcttgagaagagcatcag

SEQ ID NO: 53042 - RNA, 21 nt, RNAi
agcuugagaagagcaucaguu

SEQ ID NO: 53043 - RNA, 21 nt, RNAi
uuucgaacucuucucguaguc

SEQ ID NO: 53044 - DNA, 21 bp, homo sapiens
catcgccttcttcctcatgac

SEQ ID NO: 53045 - RNA, 21 nt, RNAi
ucgccuucuuccucaugacuu

SEQ ID NO: 53046 - RNA, 21 nt, RNAi
uuagcggaagaaggaguacug

SEQ ID NO: 53047 - DNA, 21 bp, homo sapiens
catgacgttcttggcctccta

SEQ ID NO: 53048 - RNA, 21 nt, RNAi
ugacguucuuggccuccuauu

SEQ ID NO: 53049 - RNA, 21 nt, RNAi
uuacugcaagaaccggaggau

SEQ ID NO: 53050 - DNA, 21 bp, homo sapiens
caccatacatctgtgtccgcc

SEQ ID NO: 53051 - RNA, 21 nt, RNAi
ccauacaucuguguccgccuu

SEQ ID NO: 53052 - RNA, 21 nt, RNAi
uugguauguagacacaggcgg

SEQ ID NO: 53053 - DNA, 21 bp, homo sapiens
cactgtagtggaccaagcacg

SEQ ID NO: 53054 - RNA, 21 nt, RNAi
cuguaguggaccaagcacguu

SEQ ID NO: 53055 - RNA, 21 nt, RNAi
uugacaucaccugguucgugc

SEQ ID NO: 53056 - DNA, 21 bp, homo sapiens
cagagagagcaaatcgaagcg

SEQ ID NO: 53057 - RNA, 21 nt, RNAi
gagagagcaaaucgaagcguu

SEQ ID NO: 53058 - RNA, 21 nt, RNAi
uucucucucguuuagcuucgc

SEQ ID NO: 53059 - DNA, 21 bp, homo sapiens
cagcactgcctgctgcttcct

SEQ ID NO: 53060 - RNA, 21 nt, RNAi
gcacugccugcugcuuccuuu

SEQ ID NO: 53061 - RNA, 21 nt, RNAi
uucgugacggacgacgaagga

SEQ ID NO: 53062 - DNA, 21 bp, homo sapiens
cactgcctgctgcttccttcc

SEQ ID NO: 53063 - RNA, 21 nt, RNAi
cugccugcugcuuccuuccuu

SEQ ID NO: 53064 - RNA, 21 nt, RNAi
uugacggacgacgaaggaagg

SEQ ID NO: 53065 - DNA, 21 bp, homo sapiens
cagcaataagcacgtcctcct

SEQ ID NO: 53066 - RNA, 21 nt, RNAi
gcaauaagcacguccuccuuu

SEQ ID NO: 53067 - RNA, 21 nt, RNAi
uucguuauucgugcaggagga

SEQ ID NO: 53068 - DNA, 21 bp, homo sapiens
cacttccaggattgtggtttg

SEQ ID NO: 53069 - RNA, 21 nt, RNAi
cuuccaggauugugguuuguu

SEQ ID NO: 53070 - RNA, 21 nt, RNAi
uugaagguccuaacaccaaac

SEQ ID NO: 53071 - DNA, 21 bp, homo sapiens
caggattgtggtttggattga

SEQ ID NO: 53072 - RNA, 21 nt, RNAi
ggauugugguuuggauugauu

SEQ ID NO: 53073 - RNA, 21 nt, RNAi
uuccuaacaccaaaccuaacu

SEQ ID NO: 53074 - DNA, 21 bp, homo sapiens
cagtggacaaggatggcaagg

SEQ ID NO: 53075 - RNA, 21 nt, RNAi
guggacaaggauggcaagguu

SEQ ID NO: 53076 - RNA, 21 nt, RNAi
uucaccuguuccuaccguucc

SEQ ID NO: 53077 - DNA, 21 bp, homo sapiens
caggcaggcatgtacagactc

SEQ ID NO: 53078 - RNA, 21 nt, RNAi
ggcaggcauguacagacucuu

SEQ ID NO: 53079 - RNA, 21 nt, RNAi
uuccguccguacaugucugag

SEQ ID NO: 53080 - DNA, 21 bp, homo sapiens
caggcatgtacagactctata

SEQ ID NO: 53081 - RNA, 21 nt, RNAi
ggcauguacagacucuauauu

SEQ ID NO: 53082 - RNA, 21 nt, RNAi
uuccguacaugucugagauau

SEQ ID NO: 53083 - DNA, 21 bp, homo sapiens
catgtacagactctatatctc

SEQ ID NO: 53084 - RNA, 21 nt, RNAi
uguacagacucuauaucucuu

SEQ ID NO: 53085 - RNA, 21 nt, RNAi
uuacaugucugagauauagag

SEQ ID NO: 53086 - DNA, 21 bp, homo sapiens
caggacctatgcaacgcacag

SEQ ID NO: 53087 - RNA, 21 nt, RNAi
ggaccuaugcaacgcacaguu

SEQ ID NO: 53088 - RNA, 21 nt, RNAi
uuccuggauacguugcguguc

SEQ ID NO: 53089 - DNA, 21 bp, homo sapiens
caagtgctttggctgtgactt

SEQ ID NO: 53090 - RNA, 21 nt, RNAi
agugcuuuggcugugacuuuu

SEQ ID NO: 53091 - RNA, 21 nt, RNAi
uuucacgaaaccgacacugaa

SEQ ID NO: 53092 - DNA, 21 bp, homo sapiens
catactctgctcttagtctaa

SEQ ID NO: 53093 - RNA, 21 nt, RNAi
uacucugcucuuagucuaauu

SEQ ID NO: 53094 - RNA, 21 nt, RNAi
uuaugagacgagaaucagauu

SEQ ID NO: 53095 - DNA, 21 bp, homo sapiens
gaaaccggcatgcggtgtact

SEQ ID NO: 53096 - RNA, 21 nt, RNAi
aaccggcaugcgguguacuuu

SEQ ID NO: 53097 - RNA, 21 nt, RNAi
uuuuggccguacgccacauga

SEQ ID NO: 53098 - DNA, 21 bp, homo sapiens
gaacagctccaaccagcacct

SEQ ID NO: 53099 - RNA, 21 nt, RNAi
acagcuccaaccagcaccuuu

SEQ ID NO: 53100 - RNA, 21 nt, RNAi
uuugucgagguuggucgugga

SEQ ID NO: 53101 - DNA, 21 bp, homo sapiens
gaacgtgaacgactatctgga

SEQ ID NO: 53102 - RNA, 21 nt, RNAi
acgugaacgacuaucuggauu

SEQ ID NO: 53103 - RNA, 21 nt, RNAi
uuugcacuugcugauagaccu

SEQ ID NO: 53104 - DNA, 21 bp, homo sapiens
gaacgactatctggatattta

SEQ ID NO: 53105 - RNA, 21 nt, RNAi
acgacuaucuggauauuuauu

SEQ ID NO: 53106 - RNA, 21 nt, RNAi
uuugcugauagaccuauaaau

SEQ ID NO: 53107 - DNA, 21 bp, homo sapiens
gactatctggatatttactgc

SEQ ID NO: 53108 - RNA, 21 nt, RNAi
cuaucuggauauuuacugcuu

SEQ ID NO: 53109 - RNA, 21 nt, RNAi
uugauagaccuauaaaugacg

SEQ ID NO: 53110 - DNA, 21 bp, homo sapiens
gagcagtacgtgctgtacatg

SEQ ID NO: 53111 - RNA, 21 nt, RNAi
gcaguacgugcuguacauguu

SEQ ID NO: 53112 - RNA, 21 nt, RNAi
uucgucaugcacgacauguac

SEQ ID NO: 53113 - DNA, 21 bp, homo sapiens
gagaagttccagcgctacagc

SEQ ID NO: 53114 - RNA, 21 nt, RNAi
gaaguuccagcgcuacagcuu

SEQ ID NO: 53115 - RNA, 21 nt, RNAi
uucuucaaggucgcgaugucg

SEQ ID NO: 53116 - DNA, 21 bp, homo sapiens
gaagttccagcgctacagcgc

SEQ ID NO: 53117 - RNA, 21 nt, RNAi
aguuccagcgcuacagcgcuu

SEQ ID NO: 53118 - RNA, 21 nt, RNAi
uuucaaggucgcgaugucgcg

SEQ ID NO: 53119 - DNA, 21 bp, homo sapiens
gagtactactacatctccacg

SEQ ID NO: 53120 - RNA, 21 nt, RNAi
guacuacuacaucuccacguu

SEQ ID NO: 53121 - RNA, 21 nt, RNAi
uucaugaugauguagaggugc

SEQ ID NO: 53122 - DNA, 21 bp, homo sapiens
gaagtgtctgaggatgaaggt

SEQ ID NO: 53123 - RNA, 21 nt, RNAi
agugucugaggaugaagguuu

SEQ ID NO: 53124 - RNA, 21 nt, RNAi
uuucacagacuccuacuucca

SEQ ID NO: 53125 - DNA, 21 bp, homo sapiens
gaggatgaaggtgttcgtctg

SEQ ID NO: 53126 - RNA, 21 nt, RNAi
ggaugaagguguucgucuguu

SEQ ID NO: 53127 - RNA, 21 nt, RNAi
uuccuacuuccacaagcagac

SEQ ID NO: 53128 - DNA, 21 bp, homo sapiens
gatgaaggtgttcgtctgctg

SEQ ID NO: 53129 - RNA, 21 nt, RNAi
ugaagguguucgucugcuguu

SEQ ID NO: 53130 - RNA, 21 nt, RNAi
uuacuuccacaagcagacgac

SEQ ID NO: 53131 - DNA, 21 bp, homo sapiens
gaaggtgttcgtctgctgcgc

SEQ ID NO: 53132 - RNA, 21 nt, RNAi
agguguucgucugcugcgcuu

SEQ ID NO: 53133 - RNA, 21 nt, RNAi
uuuccacaagcagacgacgcg

SEQ ID NO: 53134 - DNA, 21 bp, homo sapiens
gaagatcaacgtgctggaaga

SEQ ID NO: 53135 - RNA, 21 nt, RNAi
agaucaacgugcuggaagauu

SEQ ID NO: 53136 - RNA, 21 nt, RNAi
uuucuaguugcacgaccuucu

SEQ ID NO: 53137 - DNA, 21 bp, homo sapiens
gatcaacgtgctggaagactt

SEQ ID NO: 53138 - RNA, 21 nt, RNAi
ucaacgugcuggaagacuuuu

SEQ ID NO: 53139 - RNA, 21 nt, RNAi
uuaguugcacgaccuucugaa

SEQ ID NO: 53140 - DNA, 21 bp, homo sapiens
gacgttcttggcctcctagct

SEQ ID NO: 53141 - RNA, 21 nt, RNAi
cguucuuggccuccuagcuuu

SEQ ID NO: 53142 - RNA, 21 nt, RNAi
uugcaagaaccggaggaucga

SEQ ID NO: 53143 - DNA, 21 bp, homo sapiens
gagcctttggcctctccaagg

SEQ ID NO: 53144 - RNA, 21 nt, RNAi
gccuuuggccucuccaagguu

SEQ ID NO: 53145 - RNA, 21 nt, RNAi
uucggaaaccggagagguucc

SEQ ID NO: 53146 - DNA, 21 bp, homo sapiens
gagagagcaaatcgaagcgtg

SEQ ID NO: 53147 - RNA, 21 nt, RNAi
gagagcaaaucgaagcguguu

SEQ ID NO: 53148 - RNA, 21 nt, RNAi
uucucucguuuagcuucgcac

SEQ ID NO: 53149 - DNA, 21 bp, homo sapiens
gattgtggtttggattgaaac

SEQ ID NO: 53150 - RNA, 21 nt, RNAi
uugugguuuggauugaaacuu

SEQ ID NO: 53151 - RNA, 21 nt, RNAi
uuaacaccaaaccuaacuuug

SEQ ID NO: 53152 - DNA, 21 bp, homo sapiens
gattgaaaccaagtttacaag

SEQ ID NO: 53153 - RNA, 21 nt, RNAi
uugaaaccaaguuuacaaguu

SEQ ID NO: 53154 - RNA, 21 nt, RNAi
uuaacuuugguucaaauguuc

SEQ ID NO: 53155 - DNA, 21 bp, homo sapiens
gaaaccaagtttacaagtaga

SEQ ID NO: 53156 - RNA, 21 nt, RNAi
aaccaaguuuacaaguagauu

SEQ ID NO: 53157 - RNA, 21 nt, RNAi
uuuugguucaaauguucaucu

SEQ ID NO: 53158 - DNA, 21 bp, homo sapiens
gaagacaggacctatgcaacg

SEQ ID NO: 53159 - RNA, 21 nt, RNAi
agacaggaccuaugcaacguu

SEQ ID NO: 53160 - RNA, 21 nt, RNAi
uuucuguccuggauacguugc

SEQ ID NO: 53161 - DNA, 21 bp, homo sapiens
gacaggacctatgcaacgcac

SEQ ID NO: 53162 - RNA, 21 nt, RNAi
caggaccuaugcaacgcacuu

SEQ ID NO: 53163 - RNA, 21 nt, RNAi
uuguccuggauacguugcgug

SEQ ID NO: 53164 - DNA, 21 bp, homo sapiens
gacctatgcaacgcacagaca

SEQ ID NO: 53165 - RNA, 21 nt, RNAi
ccuaugcaacgcacagacauu

SEQ ID NO: 53166 - RNA, 21 nt, RNAi
uuggauacguugcgugucugu

SEQ ID NO: 53167 - DNA, 21 bp, homo sapiens
gactttcatactctgctctta

SEQ ID NO: 53168 - RNA, 21 nt, RNAi
cuuucauacucugcucuuauu

SEQ ID NO: 53169 - RNA, 21 nt, RNAi
uugaaaguaugagacgagaau

SEQ ID NO: 53170 - DNA, 21 bp, homo sapiens
tactggaacagctccaaccag

SEQ ID NO: 53171 - RNA, 21 nt, RNAi
cuggaacagcuccaaccaguu

SEQ ID NO: 53172 - RNA, 21 nt, RNAi
uugaccuugucgagguugguc

SEQ ID NO: 53173 - DNA, 21 bp, homo sapiens
tacaccgtgcaggtgaacgtg

SEQ ID NO: 53174 - RNA, 21 nt, RNAi
caccgugcaggugaacguguu

SEQ ID NO: 53175 - RNA, 21 nt, RNAi
uuguggcacguccacuugcac

SEQ ID NO: 53176 - DNA, 21 bp, homo sapiens
tacgtgctgtacatggtgagc

SEQ ID NO: 53177 - RNA, 21 nt, RNAi
cgugcuguacauggugagcuu

SEQ ID NO: 53178 - RNA, 21 nt, RNAi
uugcacgacauguaccacucg

SEQ ID NO: 53179 - DNA, 21 bp, homo sapiens
tacatggtgagccgcaacggc

SEQ ID NO: 53180 - RNA, 21 nt, RNAi
cauggugagccgcaacggcuu

SEQ ID NO: 53181 - RNA, 21 nt, RNAi
uuguaccacucggcguugccg

SEQ ID NO: 53182 - DNA, 21 bp, homo sapiens
taatgtttggtaccaaacttg

SEQ ID NO: 53183 - RNA, 21 nt, RNAi
auguuugguaccaaacuuguu

SEQ ID NO: 53184 - RNA, 21 nt, RNAi
uuuacaaaccaugguuugaac

SEQ ID NO: 53185 - DNA, 21 bp, homo sapiens
tacagcaataagcacgtcctc

SEQ ID NO: 53186 - RNA, 21 nt, RNAi
cagcaauaagcacguccucuu

SEQ ID NO: 53187 - RNA, 21 nt, RNAi
uugucguuauucgugcaggag

SEQ ID NO: 53188 - DNA, 21 bp, homo sapiens
tataatgtacagacagacaga

SEQ ID NO: 53189 - RNA, 21 nt, RNAi
uaauguacagacagacagauu

SEQ ID NO: 53190 - RNA, 21 nt, RNAi
uuauuacaugucugucugucu

SEQ ID NO: 53191 - DNA, 21 bp, homo sapiens
taatgtacagacagacagagt

SEQ ID NO: 53192 - RNA, 21 nt, RNAi
auguacagacagacagaguuu

SEQ ID NO: 53193 - RNA, 21 nt, RNAi
uuuacaugucugucugucuca

SEQ ID NO: 53194 - DNA, 21 bp, homo sapiens
tatgcaacgcacagacacttt

SEQ ID NO: 53195 - RNA, 21 nt, RNAi
ugcaacgcacagacacuuuuu

SEQ ID NO: 53196 - RNA, 21 nt, RNAi
uuacguugcgugucugugaaa

SEQ ID NO: 53197 - DNA, 21 bp, homo sapiens
aacgtgaacgactatctggat

SEQ ID NO: 53198 - RNA, 21 nt, RNAi
cgugaacgacuaucuggauuu

SEQ ID NO: 53199 - RNA, 21 nt, RNAi
uugcacuugcugauagaccua

SEQ ID NO: 53200 - DNA, 21 bp, homo sapiens
caggtgaacgtgaacgactat

SEQ ID NO: 53201 - RNA, 21 nt, RNAi
ggugaacgugaacgacuauuu

SEQ ID NO: 53202 - RNA, 21 nt, RNAi
uuccacuugcacuugcugaua

SEQ ID NO: 53203 - DNA, 21 bp, homo sapiens
gaacgtgaacgactatctgga

SEQ ID NO: 53204 - RNA, 21 nt, RNAi
acgugaacgacuaucuggauu

SEQ ID NO: 53205 - RNA, 21 nt, RNAi
uuugcacuugcugauagaccu

SEQ ID NO: 53206 - DNA, 21 bp, homo sapiens
aacgtgtgtgctgtgcagaag

SEQ ID NO: 53207 - RNA, 21 nt, RNAi
cgugugugcugugcagaaguu

SEQ ID NO: 53208 - RNA, 21 nt, RNAi
uugcacacacgacacgucuuc

SEQ ID NO: 53209 - DNA, 21 bp, homo sapiens
aaggttattggcactaatagg

SEQ ID NO: 53210 - RNA, 21 nt, RNAi
gguuauuggcacuaauagguu

SEQ ID NO: 53211 - RNA, 21 nt, RNAi
uuccaauaaccgugauuaucc

SEQ ID NO: 53212 - DNA, 21 bp, homo sapiens
aataggaagtacttcaccaac

SEQ ID NO: 53213 - RNA, 21 nt, RNAi
uaggaaguacuucaccaacuu

SEQ ID NO: 53214 - RNA, 21 nt, RNAi
uuauccuucaugaagugguug

SEQ ID NO: 53215 - DNA, 21 bp, homo sapiens
aagtacttcaccaactgcaag

SEQ ID NO: 53216 - RNA, 21 nt, RNAi
guacuucaccaacugcaaguu

SEQ ID NO: 53217 - RNA, 21 nt, RNAi
uucaugaagugguugacguuc

SEQ ID NO: 53218 - DNA, 21 bp, homo sapiens
aactgcaagcagtggtaccaa

SEQ ID NO: 53219 - RNA, 21 nt, RNAi
cugcaagcagugguaccaauu

SEQ ID NO: 53220 - RNA, 21 nt, RNAi
uugacguucgucaccaugguu

SEQ ID NO: 53221 - DNA, 21 bp, homo sapiens
aagcagtggtaccaaaggaaa

SEQ ID NO: 53222 - RNA, 21 nt, RNAi
gcagugguaccaaaggaaauu

SEQ ID NO: 53223 - RNA, 21 nt, RNAi
uucgucaccaugguuuccuuu

SEQ ID NO: 53224 - DNA, 21 bp, homo sapiens
aaatctgtggcaaatcaacag

SEQ ID NO: 53225 - RNA, 21 nt, RNAi
aucuguggcaaaucaacaguu

SEQ ID NO: 53226 - RNA, 21 nt, RNAi
uuuagacaccguuuaguuguc

SEQ ID NO: 53227 - DNA, 21 bp, homo sapiens
aatctgtggcaaatcaacagt

SEQ ID NO: 53228 - RNA, 21 nt, RNAi
ucuguggcaaaucaacaguuu

SEQ ID NO: 53229 - RNA, 21 nt, RNAi
uuagacaccguuuaguuguca

SEQ ID NO: 53230 - DNA, 21 bp, homo sapiens
aaatcaacagtcatcagctac

SEQ ID NO: 53231 - RNA, 21 nt, RNAi
aucaacagucaucagcuacuu

SEQ ID NO: 53232 - RNA, 21 nt, RNAi
uuuaguugucaguagucgaug

SEQ ID NO: 53233 - DNA, 21 bp, homo sapiens
aatcaacagtcatcagctacg

SEQ ID NO: 53234 - RNA, 21 nt, RNAi
ucaacagucaucagcuacguu

SEQ ID NO: 53235 - RNA, 21 nt, RNAi
uuaguugucaguagucgaugc

SEQ ID NO: 53236 - DNA, 21 bp, homo sapiens
aacagtcatcagctacgagtg

SEQ ID NO: 53237 - RNA, 21 nt, RNAi
cagucaucagcuacgaguguu

SEQ ID NO: 53238 - RNA, 21 nt, RNAi
uugucaguagucgaugcucac

SEQ ID NO: 53239 - DNA, 21 bp, homo sapiens
aagctgaggcctgagatggag

SEQ ID NO: 53240 - RNA, 21 nt, RNAi
gcugaggccugagauggaguu

SEQ ID NO: 53241 - RNA, 21 nt, RNAi
uucgacuccggacucuaccuc

SEQ ID NO: 53242 - DNA, 21 bp, homo sapiens
aatgtcaacattgagctgctc

SEQ ID NO: 53243 - RNA, 21 nt, RNAi
ugucaacauugagcugcucuu

SEQ ID NO: 53244 - RNA, 21 nt, RNAi
uuacaguuguaacucgacgag

SEQ ID NO: 53245 - DNA, 21 bp, homo sapiens
aacattgagctgctcaatgcc

SEQ ID NO: 53246 - RNA, 21 nt, RNAi
cauugagcugcucaaugccuu

SEQ ID NO: 53247 - RNA, 21 nt, RNAi
uuguaacucgacgaguuacgg

SEQ ID NO: 53248 - DNA, 21 bp, homo sapiens
aattccaacatccagatccac

SEQ ID NO: 53249 - RNA, 21 nt, RNAi
uuccaacauccagauccacuu

SEQ ID NO: 53250 - RNA, 21 nt, RNAi
uuaagguuguaggucuaggug

SEQ ID NO: 53251 - DNA, 21 bp, homo sapiens
aacatccagatccaccactat

SEQ ID NO: 53252 - RNA, 21 nt, RNAi
cauccagauccaccacuauuu

SEQ ID NO: 53253 - RNA, 21 nt, RNAi
uuguaggucuagguggugaua

SEQ ID NO: 53254 - DNA, 21 bp, homo sapiens
aaagccgaccaccatgcaacc

SEQ ID NO: 53255 - RNA, 21 nt, RNAi
agccgaccaccaugcaaccuu

SEQ ID NO: 53256 - RNA, 21 nt, RNAi
uuucggcuggugguacguugg

SEQ ID NO: 53257 - DNA, 21 bp, homo sapiens
aagccgaccaccatgcaacca

SEQ ID NO: 53258 - RNA, 21 nt, RNAi
gccgaccaccaugcaaccauu

SEQ ID NO: 53259 - RNA, 21 nt, RNAi
uucggcuggugguacguuggu

SEQ ID NO: 53260 - DNA, 21 bp, homo sapiens
aaggtcatctccaccatcacc

SEQ ID NO: 53261 - RNA, 21 nt, RNAi
ggucaucuccaccaucaccuu

SEQ ID NO: 53262 - RNA, 21 nt, RNAi
uuccaguagaggugguagugg

SEQ ID NO: 53263 - DNA, 21 bp, homo sapiens
aacaacatccagcagatcatt

SEQ ID NO: 53264 - RNA, 21 nt, RNAi
caacauccagcagaucauuuu

SEQ ID NO: 53265 - RNA, 21 nt, RNAi
uuguuguaggucgucuaguaa

SEQ ID NO: 53266 - DNA, 21 bp, homo sapiens
aacatccagcagatcattgag

SEQ ID NO: 53267 - RNA, 21 nt, RNAi
cauccagcagaucauugaguu

SEQ ID NO: 53268 - RNA, 21 nt, RNAi
uuguaggucgucuaguaacuc

SEQ ID NO: 53269 - DNA, 21 bp, homo sapiens
aacacgatgcttgaaggtaac

SEQ ID NO: 53270 - RNA, 21 nt, RNAi
cacgaugcuugaagguaacuu

SEQ ID NO: 53271 - RNA, 21 nt, RNAi
uugugcuacgaacuuccauug

SEQ ID NO: 53272 - DNA, 21 bp, homo sapiens
aaggtaacggccagtacacgc

SEQ ID NO: 53273 - RNA, 21 nt, RNAi
gguaacggccaguacacgcuu

SEQ ID NO: 53274 - RNA, 21 nt, RNAi
uuccauugccggucaugugcg

SEQ ID NO: 53275 - DNA, 21 bp, homo sapiens
aatgaggccttcgagaagatc

SEQ ID NO: 53276 - RNA, 21 nt, RNAi
ugaggccuucgagaagaucuu

SEQ ID NO: 53277 - RNA, 21 nt, RNAi
uuacuccggaagcucuucuag

SEQ ID NO: 53278 - DNA, 21 bp, homo sapiens
aacaaccacatcttgaagtca

SEQ ID NO: 53279 - RNA, 21 nt, RNAi
caaccacaucuugaagucauu

SEQ ID NO: 53280 - RNA, 21 nt, RNAi
uuguugguguagaacuucagu

SEQ ID NO: 53281 - DNA, 21 bp, homo sapiens
aaccacatcttgaagtcagct

SEQ ID NO: 53282 - RNA, 21 nt, RNAi
ccacaucuugaagucagcuuu

SEQ ID NO: 53283 - RNA, 21 nt, RNAi
uugguguagaacuucagucga

SEQ ID NO: 53284 - DNA, 21 bp, homo sapiens
aagtcagctatgtgtgctgaa

SEQ ID NO: 53285 - RNA, 21 nt, RNAi
gucagcuaugugugcugaauu

SEQ ID NO: 53286 - RNA, 21 nt, RNAi
uucagucgauacacacgacuu

SEQ ID NO: 53287 - DNA, 21 bp, homo sapiens
aaggcgatcatctccaataaa

SEQ ID NO: 53288 - RNA, 21 nt, RNAi
ggcgaucaucuccaauaaauu

SEQ ID NO: 53289 - RNA, 21 nt, RNAi
uuccgcuaguagagguuauuu

SEQ ID NO: 53290 - DNA, 21 bp, homo sapiens
aataaagacatcctagccacc

SEQ ID NO: 53291 - RNA, 21 nt, RNAi
uaaagacauccuagccaccuu

SEQ ID NO: 53292 - RNA, 21 nt, RNAi
uuauuucuguaggaucggugg

SEQ ID NO: 53293 - DNA, 21 bp, homo sapiens
aaagacatcctagccaccaac

SEQ ID NO: 53294 - RNA, 21 nt, RNAi
agacauccuagccaccaacuu

SEQ ID NO: 53295 - RNA, 21 nt, RNAi
uuucuguaggaucggugguug

SEQ ID NO: 53296 - DNA, 21 bp, homo sapiens
aagacatcctagccaccaacg

SEQ ID NO: 53297 - RNA, 21 nt, RNAi
gacauccuagccaccaacguu

SEQ ID NO: 53298 - RNA, 21 nt, RNAi
uucuguaggaucggugguugc

SEQ ID NO: 53299 - DNA, 21 bp, homo sapiens
aagacactatttgaattggct

SEQ ID NO: 53300 - RNA, 21 nt, RNAi
gacacuauuugaauuggcuuu

SEQ ID NO: 53301 - RNA, 21 nt, RNAi
uucugugauaaacuuaaccga

SEQ ID NO: 53302 - DNA, 21 bp, homo sapiens
aattggctgcagagtctgatg

SEQ ID NO: 53303 - RNA, 21 nt, RNAi
uuggcugcagagucugauguu

SEQ ID NO: 53304 - RNA, 21 nt, RNAi
uuaaccgacgucucagacuac

SEQ ID NO: 53305 - DNA, 21 bp, homo sapiens
aatcatctctctggaagtgag

SEQ ID NO: 53306 - RNA, 21 nt, RNAi
ucaucucucuggaagugaguu

SEQ ID NO: 53307 - RNA, 21 nt, RNAi
uuaguagagagaccuucacuc

SEQ ID NO: 53308 - DNA, 21 bp, homo sapiens
aaggaatttgcttcggaacca

SEQ ID NO: 53309 - RNA, 21 nt, RNAi
ggaauuugcuucggaaccauu

SEQ ID NO: 53310 - RNA, 21 nt, RNAi
uuccuuaaacgaagccuuggu

SEQ ID NO: 53311 - DNA, 21 bp, homo sapiens
aatttgcttcggaaccacata

SEQ ID NO: 53312 - RNA, 21 nt, RNAi
uuugcuucggaaccacauauu

SEQ ID NO: 53313 - RNA, 21 nt, RNAi
uuaaacgaagccuugguguau

SEQ ID NO: 53314 - DNA, 21 bp, homo sapiens
aaccacataattaaagaccag

SEQ ID NO: 53315 - RNA, 21 nt, RNAi
ccacauaauuaaagaccaguu

SEQ ID NO: 53316 - RNA, 21 nt, RNAi
uugguguauuaauuucugguc

SEQ ID NO: 53317 - DNA, 21 bp, homo sapiens
aattaaagaccagctggcctc

SEQ ID NO: 53318 - RNA, 21 nt, RNAi
uuaaagaccagcuggccucuu

SEQ ID NO: 53319 - RNA, 21 nt, RNAi
uuaauuucuggucgaccggag

SEQ ID NO: 53320 - DNA, 21 bp, homo sapiens
aaagaccagctggcctctaag

SEQ ID NO: 53321 - RNA, 21 nt, RNAi
agaccagcuggccucuaaguu

SEQ ID NO: 53322 - RNA, 21 nt, RNAi
uuucuggucgaccggagauuc

SEQ ID NO: 53323 - DNA, 21 bp, homo sapiens
aagaccagctggcctctaagt

SEQ ID NO: 53324 - RNA, 21 nt, RNAi
gaccagcuggccucuaaguuu

SEQ ID NO: 53325 - RNA, 21 nt, RNAi
uucuggucgaccggagauuca

SEQ ID NO: 53326 - DNA, 21 bp, homo sapiens
aagtatctgtaccatggacag

SEQ ID NO: 53327 - RNA, 21 nt, RNAi
guaucuguaccauggacaguu

SEQ ID NO: 53328 - RNA, 21 nt, RNAi
uucauagacaugguaccuguc

SEQ ID NO: 53329 - DNA, 21 bp, homo sapiens
aatagcctttgcattgagaac

SEQ ID NO: 53330 - RNA, 21 nt, RNAi
uagccuuugcauugagaacuu

SEQ ID NO: 53331 - RNA, 21 nt, RNAi
uuaucggaaacguaacucuug

SEQ ID NO: 53332 - DNA, 21 bp, homo sapiens
aatcgctttagcatgctggta

SEQ ID NO: 53333 - RNA, 21 nt, RNAi
ucgcuuuagcaugcugguauu

SEQ ID NO: 53334 - RNA, 21 nt, RNAi
uuagcgaaaucguacgaccau

SEQ ID NO: 53335 - DNA, 21 bp, homo sapiens
aaggagtctacacagtcttcg

SEQ ID NO: 53336 - RNA, 21 nt, RNAi
ggagucuacacagucuucguu

SEQ ID NO: 53337 - RNA, 21 nt, RNAi
uuccucagaugugucagaagc

SEQ ID NO: 53338 - DNA, 21 bp, homo sapiens
aagagaacggagcagactctt

SEQ ID NO: 53339 - RNA, 21 nt, RNAi
gagaacggagcagacucuuuu

SEQ ID NO: 53340 - RNA, 21 nt, RNAi
uucucuugccucgucugagaa

SEQ ID NO: 53341 - DNA, 21 bp, homo sapiens
aaggaacttgccaacatcctg

SEQ ID NO: 53342 - RNA, 21 nt, RNAi
ggaacuugccaacauccuguu

SEQ ID NO: 53343 - RNA, 21 nt, RNAi
uuccuugaacgguuguaggac

SEQ ID NO: 53344 - DNA, 21 bp, homo sapiens
aacttgccaacatcctgaaat

SEQ ID NO: 53345 - RNA, 21 nt, RNAi
cuugccaacauccugaaauuu

SEQ ID NO: 53346 - RNA, 21 nt, RNAi
uugaacgguuguaggacuuua

SEQ ID NO: 53347 - DNA, 21 bp, homo sapiens
aacatcctgaaataccacatt

SEQ ID NO: 53348 - RNA, 21 nt, RNAi
cauccugaaauaccacauuuu

SEQ ID NO: 53349 - RNA, 21 nt, RNAi
uuguaggacuuuaugguguaa

SEQ ID NO: 53350 - DNA, 21 bp, homo sapiens
aaataccacattggtgatgaa

SEQ ID NO: 53351 - RNA, 21 nt, RNAi
auaccacauuggugaugaauu

SEQ ID NO: 53352 - RNA, 21 nt, RNAi
uuuaugguguaaccacuacuu

SEQ ID NO: 53353 - DNA, 21 bp, homo sapiens
aataccacattggtgatgaaa

SEQ ID NO: 53354 - RNA, 21 nt, RNAi
uaccacauuggugaugaaauu

SEQ ID NO: 53355 - RNA, 21 nt, RNAi
uuaugguguaaccacuacuuu

SEQ ID NO: 53356 - DNA, 21 bp, homo sapiens
aaatcctggttagcggaggca

SEQ ID NO: 53357 - RNA, 21 nt, RNAi
auccugguuagcggaggcauu

SEQ ID NO: 53358 - RNA, 21 nt, RNAi
uuuaggaccaaucgccuccgu

SEQ ID NO: 53359 - DNA, 21 bp, homo sapiens
aatcctggttagcggaggcat

SEQ ID NO: 53360 - RNA, 21 nt, RNAi
uccugguuagcggaggcauuu

SEQ ID NO: 53361 - RNA, 21 nt, RNAi
uuaggaccaaucgccuccgua

SEQ ID NO: 53362 - DNA, 21 bp, homo sapiens
aaagtctctccaaggtgacaa

SEQ ID NO: 53363 - RNA, 21 nt, RNAi
agucucuccaaggugacaauu

SEQ ID NO: 53364 - RNA, 21 nt, RNAi
uuucagagagguuccacuguu

SEQ ID NO: 53365 - DNA, 21 bp, homo sapiens
aagtctctccaaggtgacaag

SEQ ID NO: 53366 - RNA, 21 nt, RNAi
gucucuccaaggugacaaguu

SEQ ID NO: 53367 - RNA, 21 nt, RNAi
uucagagagguuccacuguuc

SEQ ID NO: 53368 - DNA, 21 bp, homo sapiens
aaggtgacaagctggaagtca

SEQ ID NO: 53369 - RNA, 21 nt, RNAi
ggugacaagcuggaagucauu

SEQ ID NO: 53370 - RNA, 21 nt, RNAi
uuccacuguucgaccuucagu

SEQ ID NO: 53371 - DNA, 21 bp, homo sapiens
aagctggaagtcagcttgaaa

SEQ ID NO: 53372 - RNA, 21 nt, RNAi
gcuggaagucagcuugaaauu

SEQ ID NO: 53373 - RNA, 21 nt, RNAi
uucgaccuucagucgaacuuu

SEQ ID NO: 53374 - DNA, 21 bp, homo sapiens
aaacaatgtggtgagtgtcaa

SEQ ID NO: 53375 - RNA, 21 nt, RNAi
acaauguggugagugucaauu

SEQ ID NO: 53376 - RNA, 21 nt, RNAi
uuuguuacaccacucacaguu

SEQ ID NO: 53377 - DNA, 21 bp, homo sapiens
aacaatgtggtgagtgtcaac

SEQ ID NO: 53378 - RNA, 21 nt, RNAi
caauguggugagugucaacuu

SEQ ID NO: 53379 - RNA, 21 nt, RNAi
uuguuacaccacucacaguug

SEQ ID NO: 53380 - DNA, 21 bp, homo sapiens
aatgtggtgagtgtcaacaag

SEQ ID NO: 53381 - RNA, 21 nt, RNAi
uguggugagugucaacaaguu

SEQ ID NO: 53382 - RNA, 21 nt, RNAi
uuacaccacucacaguuguuc

SEQ ID NO: 53383 - DNA, 21 bp, homo sapiens
aacaaggagcctgttgccgag

SEQ ID NO: 53384 - RNA, 21 nt, RNAi
caaggagccuguugccgaguu

SEQ ID NO: 53385 - RNA, 21 nt, RNAi
uuguuccucggacaacggcuc

SEQ ID NO: 53386 - DNA, 21 bp, homo sapiens
aaggagcctgttgccgagcct

SEQ ID NO: 53387 - RNA, 21 nt, RNAi
ggagccuguugccgagccuuu

SEQ ID NO: 53388 - RNA, 21 nt, RNAi
uuccucggacaacggcucgga

SEQ ID NO: 53389 - DNA, 21 bp, homo sapiens
aaatggcgtggtccatgtcat

SEQ ID NO: 53390 - RNA, 21 nt, RNAi
auggcgugguccaugucauuu

SEQ ID NO: 53391 - RNA, 21 nt, RNAi
uuuaccgcaccagguacagua

SEQ ID NO: 53392 - DNA, 21 bp, homo sapiens
aatggcgtggtccatgtcatc

SEQ ID NO: 53393 - RNA, 21 nt, RNAi
uggcgugguccaugucaucuu

SEQ ID NO: 53394 - RNA, 21 nt, RNAi
uuaccgcaccagguacaguag

SEQ ID NO: 53395 - DNA, 21 bp, homo sapiens
aatgttctgcagcctccagcc

SEQ ID NO: 53396 - RNA, 21 nt, RNAi
uguucugcagccuccagccuu

SEQ ID NO: 53397 - RNA, 21 nt, RNAi
uuacaagacgucggaggucgg

SEQ ID NO: 53398 - DNA, 21 bp, homo sapiens
aacttgcagactctgcgcttg

SEQ ID NO: 53399 - RNA, 21 nt, RNAi
cuugcagacucugcgcuuguu

SEQ ID NO: 53400 - RNA, 21 nt, RNAi
uugaacgucugagacgcgaac

SEQ ID NO: 53401 - DNA, 21 bp, homo sapiens
aagttattagagaggatgaag

SEQ ID NO: 53402 - RNA, 21 nt, RNAi
guuauuagagaggaugaaguu

SEQ ID NO: 53403 - RNA, 21 nt, RNAi
uucaauaaucucuccuacuuc

SEQ ID NO: 53404 - DNA, 21 bp, homo sapiens
aagcattagcttgaagcacta

SEQ ID NO: 53405 - RNA, 21 nt, RNAi
gcauuagcuugaagcacuauu

SEQ ID NO: 53406 - RNA, 21 nt, RNAi
uucguaaucgaacuucgugau

SEQ ID NO: 53407 - DNA, 21 bp, homo sapiens
aagcactacaggaggaatgca

SEQ ID NO: 53408 - RNA, 21 nt, RNAi
gcacuacaggaggaaugcauu

SEQ ID NO: 53409 - RNA, 21 nt, RNAi
uucgugauguccuccuuacgu

SEQ ID NO: 53410 - DNA, 21 bp, homo sapiens
aatgcaccacggcagctctcc

SEQ ID NO: 53411 - RNA, 21 nt, RNAi
ugcaccacggcagcucuccuu

SEQ ID NO: 53412 - RNA, 21 nt, RNAi
uuacguggugccgucgagagg

SEQ ID NO: 53413 - DNA, 21 bp, homo sapiens
aatttctctcagatttccaca

SEQ ID NO: 53414 - RNA, 21 nt, RNAi
uuucucucagauuuccacauu

SEQ ID NO: 53415 - RNA, 21 nt, RNAi
uuaaagagagucuaaaggugu

SEQ ID NO: 53416 - DNA, 21 bp, homo sapiens
aatgagatgtgagccttgtgc

SEQ ID NO: 53417 - RNA, 21 nt, RNAi
ugagaugugagccuugugcuu

SEQ ID NO: 53418 - RNA, 21 nt, RNAi
uuacucuacacucggaacacg

SEQ ID NO: 53419 - DNA, 21 bp, homo sapiens
aaacttggatgtcactgcctg

SEQ ID NO: 53420 - RNA, 21 nt, RNAi
acuuggaugucacugccuguu

SEQ ID NO: 53421 - RNA, 21 nt, RNAi
uuugaaccuacagugacggac

SEQ ID NO: 53422 - DNA, 21 bp, homo sapiens
aacttggatgtcactgcctga

SEQ ID NO: 53423 - RNA, 21 nt, RNAi
cuuggaugucacugccugauu

SEQ ID NO: 53424 - RNA, 21 nt, RNAi
uugaaccuacagugacggacu

SEQ ID NO: 53425 - DNA, 21 bp, homo sapiens
aaatgtggaattgactgccta

SEQ ID NO: 53426 - RNA, 21 nt, RNAi
auguggaauugacugccuauu

SEQ ID NO: 53427 - RNA, 21 nt, RNAi
uuuacaccuuaacugacggau

SEQ ID NO: 53428 - DNA, 21 bp, homo sapiens
aatgtggaattgactgcctat

SEQ ID NO: 53429 - RNA, 21 nt, RNAi
uguggaauugacugccuauuu

SEQ ID NO: 53430 - RNA, 21 nt, RNAi
uuacaccuuaacugacggaua

SEQ ID NO: 53431 - DNA, 21 bp, homo sapiens
aattgactgcctatgccaagt

SEQ ID NO: 53432 - RNA, 21 nt, RNAi
uugacugccuaugccaaguuu

SEQ ID NO: 53433 - RNA, 21 nt, RNAi
uuaacugacggauacgguuca

SEQ ID NO: 53434 - DNA, 21 bp, homo sapiens
aaaggagcttcagtattgtgg

SEQ ID NO: 53435 - RNA, 21 nt, RNAi
aggagcuucaguauugugguu

SEQ ID NO: 53436 - RNA, 21 nt, RNAi
uuuccucgaagucauaacacc

SEQ ID NO: 53437 - DNA, 21 bp, homo sapiens
aaacatgaatcaagcaatcca

SEQ ID NO: 53438 - RNA, 21 nt, RNAi
acaugaaucaagcaauccauu

SEQ ID NO: 53439 - RNA, 21 nt, RNAi
uuuguacuuaguucguuaggu

SEQ ID NO: 53440 - DNA, 21 bp, homo sapiens
aacatgaatcaagcaatccag

SEQ ID NO: 53441 - RNA, 21 nt, RNAi
caugaaucaagcaauccaguu

SEQ ID NO: 53442 - RNA, 21 nt, RNAi
uuguacuuaguucguuagguc

SEQ ID NO: 53443 - DNA, 21 bp, homo sapiens
aatcaagcaatccagcctcat

SEQ ID NO: 53444 - RNA, 21 nt, RNAi
ucaagcaauccagccucauuu

SEQ ID NO: 53445 - RNA, 21 nt, RNAi
uuaguucguuaggucggagua

SEQ ID NO: 53446 - DNA, 21 bp, homo sapiens
aagctatgagttgaaatgttc

SEQ ID NO: 53447 - RNA, 21 nt, RNAi
gcuaugaguugaaauguucuu

SEQ ID NO: 53448 - RNA, 21 nt, RNAi
uucgauacucaacuuuacaag

SEQ ID NO: 53449 - DNA, 21 bp, homo sapiens
aaatgttctgtcaaatgtgtc

SEQ ID NO: 53450 - RNA, 21 nt, RNAi
auguucugucaaaugugucuu

SEQ ID NO: 53451 - RNA, 21 nt, RNAi
uuuacaagacaguuuacacag

SEQ ID NO: 53452 - DNA, 21 bp, homo sapiens
aatgttctgtcaaatgtgtct

SEQ ID NO: 53453 - RNA, 21 nt, RNAi
uguucugucaaaugugucuuu

SEQ ID NO: 53454 - RNA, 21 nt, RNAi
uuacaagacaguuuacacaga

SEQ ID NO: 53455 - DNA, 21 bp, homo sapiens
aaatgtgtctcacatctacac

SEQ ID NO: 53456 - RNA, 21 nt, RNAi
augugucucacaucuacacuu

SEQ ID NO: 53457 - RNA, 21 nt, RNAi
uuuacacagaguguagaugug

SEQ ID NO: 53458 - DNA, 21 bp, homo sapiens
aatgtgtctcacatctacacg

SEQ ID NO: 53459 - RNA, 21 nt, RNAi
ugugucucacaucuacacguu

SEQ ID NO: 53460 - RNA, 21 nt, RNAi
uuacacagaguguagaugugc

SEQ ID NO: 53461 - DNA, 21 bp, homo sapiens
aaagaaatggtatgtagagct

SEQ ID NO: 53462 - RNA, 21 nt, RNAi
agaaaugguauguagagcuuu

SEQ ID NO: 53463 - RNA, 21 nt, RNAi
uuucuuuaccauacaucucga

SEQ ID NO: 53464 - DNA, 21 bp, homo sapiens
aagaaatggtatgtagagctt

SEQ ID NO: 53465 - RNA, 21 nt, RNAi
gaaaugguauguagagcuuuu

SEQ ID NO: 53466 - RNA, 21 nt, RNAi
uucuuuaccauacaucucgaa

SEQ ID NO: 53467 - DNA, 21 bp, homo sapiens
aaatggtatgtagagcttaga

SEQ ID NO: 53468 - RNA, 21 nt, RNAi
augguauguagagcuuagauu

SEQ ID NO: 53469 - RNA, 21 nt, RNAi
uuuaccauacaucucgaaucu

SEQ ID NO: 53470 - DNA, 21 bp, homo sapiens
aatggtatgtagagcttagat

SEQ ID NO: 53471 - RNA, 21 nt, RNAi
ugguauguagagcuuagauuu

SEQ ID NO: 53472 - RNA, 21 nt, RNAi
uuaccauacaucucgaaucua

SEQ ID NO: 53473 - DNA, 21 bp, homo sapiens
caacgtgtgtgctgtgcagaa

SEQ ID NO: 53474 - RNA, 21 nt, RNAi
acgugugugcugugcagaauu

SEQ ID NO: 53475 - RNA, 21 nt, RNAi
uuugcacacacgacacgucuu

SEQ ID NO: 53476 - DNA, 21 bp, homo sapiens
cagaaggttattggcactaat

SEQ ID NO: 53477 - RNA, 21 nt, RNAi
gaagguuauuggcacuaauuu

SEQ ID NO: 53478 - RNA, 21 nt, RNAi
uucuuccaauaaccgugauua

SEQ ID NO: 53479 - DNA, 21 bp, homo sapiens
cactaataggaagtacttcac

SEQ ID NO: 53480 - RNA, 21 nt, RNAi
cuaauaggaaguacuucacuu

SEQ ID NO: 53481 - RNA, 21 nt, RNAi
uugauuauccuucaugaagug

SEQ ID NO: 53482 - DNA, 21 bp, homo sapiens
caccaactgcaagcagtggta

SEQ ID NO: 53483 - RNA, 21 nt, RNAi
ccaacugcaagcagugguauu

SEQ ID NO: 53484 - RNA, 21 nt, RNAi
uugguugacguucgucaccau

SEQ ID NO: 53485 - DNA, 21 bp, homo sapiens
caactgcaagcagtggtacca

SEQ ID NO: 53486 - RNA, 21 nt, RNAi
acugcaagcagugguaccauu

SEQ ID NO: 53487 - RNA, 21 nt, RNAi
uuugacguucgucaccauggu

SEQ ID NO: 53488 - DNA, 21 bp, homo sapiens
caagcagtggtaccaaaggaa

SEQ ID NO: 53489 - RNA, 21 nt, RNAi
agcagugguaccaaaggaauu

SEQ ID NO: 53490 - RNA, 21 nt, RNAi
uuucgucaccaugguuuccuu

SEQ ID NO: 53491 - DNA, 21 bp, homo sapiens
caaatcaacagtcatcagcta

SEQ ID NO: 53492 - RNA, 21 nt, RNAi
aaucaacagucaucagcuauu

SEQ ID NO: 53493 - RNA, 21 nt, RNAi
uuuuaguugucaguagucgau

SEQ ID NO: 53494 - DNA, 21 bp, homo sapiens
caacagtcatcagctacgagt

SEQ ID NO: 53495 - RNA, 21 nt, RNAi
acagucaucagcuacgaguuu

SEQ ID NO: 53496 - RNA, 21 nt, RNAi
uuugucaguagucgaugcuca

SEQ ID NO: 53497 - DNA, 21 bp, homo sapiens
cagtcatcagctacgagtgct

SEQ ID NO: 53498 - RNA, 21 nt, RNAi
gucaucagcuacgagugcuuu

SEQ ID NO: 53499 - RNA, 21 nt, RNAi
uucaguagucgaugcucacga

SEQ ID NO: 53500 - DNA, 21 bp, homo sapiens
catcagctacgagtgctgtcc

SEQ ID NO: 53501 - RNA, 21 nt, RNAi
ucagcuacgagugcuguccuu

SEQ ID NO: 53502 - RNA, 21 nt, RNAi
uuagucgaugcucacgacagg

SEQ ID NO: 53503 - DNA, 21 bp, homo sapiens
cagctacgagtgctgtcctgg

SEQ ID NO: 53504 - RNA, 21 nt, RNAi
gcuacgagugcuguccugguu

SEQ ID NO: 53505 - RNA, 21 nt, RNAi
uucgaugcucacgacaggacc

SEQ ID NO: 53506 - DNA, 21 bp, homo sapiens
cactctcaaacctttacgaga

SEQ ID NO: 53507 - RNA, 21 nt, RNAi
cucucaaaccuuuacgagauu

SEQ ID NO: 53508 - RNA, 21 nt, RNAi
uugagaguuuggaaaugcucu

SEQ ID NO: 53509 - DNA, 21 bp, homo sapiens
caccaccactcagctgtacac

SEQ ID NO: 53510 - RNA, 21 nt, RNAi
ccaccacucagcuguacacuu

SEQ ID NO: 53511 - RNA, 21 nt, RNAi
uugguggugagucgacaugug

SEQ ID NO: 53512 - DNA, 21 bp, homo sapiens
caccactcagctgtacacgga

SEQ ID NO: 53513 - RNA, 21 nt, RNAi
ccacucagcuguacacggauu

SEQ ID NO: 53514 - RNA, 21 nt, RNAi
uuggugagucgacaugugccu

SEQ ID NO: 53515 - DNA, 21 bp, homo sapiens
cactcagctgtacacggaccg

SEQ ID NO: 53516 - RNA, 21 nt, RNAi
cucagcuguacacggaccguu

SEQ ID NO: 53517 - RNA, 21 nt, RNAi
uugagucgacaugugccuggc

SEQ ID NO: 53518 - DNA, 21 bp, homo sapiens
cacggagaagctgaggcctga

SEQ ID NO: 53519 - RNA, 21 nt, RNAi
cggagaagcugaggccugauu

SEQ ID NO: 53520 - RNA, 21 nt, RNAi
uugccucuucgacuccggacu

SEQ ID NO: 53521 - DNA, 21 bp, homo sapiens
cagcaatgtcaacattgagct

SEQ ID NO: 53522 - RNA, 21 nt, RNAi
gcaaugucaacauugagcuuu

SEQ ID NO: 53523 - RNA, 21 nt, RNAi
uucguuacaguuguaacucga

SEQ ID NO: 53524 - DNA, 21 bp, homo sapiens
caatgtcaacattgagctgct

SEQ ID NO: 53525 - RNA, 21 nt, RNAi
augucaacauugagcugcuuu

SEQ ID NO: 53526 - RNA, 21 nt, RNAi
uuuacaguuguaacucgacga

SEQ ID NO: 53527 - DNA, 21 bp, homo sapiens
caacattgagctgctcaatgc

SEQ ID NO: 53528 - RNA, 21 nt, RNAi
acauugagcugcucaaugcuu

SEQ ID NO: 53529 - RNA, 21 nt, RNAi
uuuguaacucgacgaguuacg

SEQ ID NO: 53530 - DNA, 21 bp, homo sapiens
caggcgagtcctgactgatga

SEQ ID NO: 53531 - RNA, 21 nt, RNAi
ggcgaguccugacugaugauu

SEQ ID NO: 53532 - RNA, 21 nt, RNAi
uuccgcucaggacugacuacu

SEQ ID NO: 53533 - DNA, 21 bp, homo sapiens
cacctctatgtaccagaattc

SEQ ID NO: 53534 - RNA, 21 nt, RNAi
ccucuauguaccagaauucuu

SEQ ID NO: 53535 - RNA, 21 nt, RNAi
uuggagauacauggucuuaag

SEQ ID NO: 53536 - DNA, 21 bp, homo sapiens
cagaattccaacatccagatc

SEQ ID NO: 53537 - RNA, 21 nt, RNAi
gaauuccaacauccagaucuu

SEQ ID NO: 53538 - RNA, 21 nt, RNAi
uucuuaagguuguaggucuag

SEQ ID NO: 53539 - DNA, 21 bp, homo sapiens
caacatccagatccaccacta

SEQ ID NO: 53540 - RNA, 21 nt, RNAi
acauccagauccaccacuauu

SEQ ID NO: 53541 - RNA, 21 nt, RNAi
uuuguaggucuagguggugau

SEQ ID NO: 53542 - DNA, 21 bp, homo sapiens
catccagatccaccactatcc

SEQ ID NO: 53543 - RNA, 21 nt, RNAi
uccagauccaccacuauccuu

SEQ ID NO: 53544 - RNA, 21 nt, RNAi
uuaggucuagguggugauagg

SEQ ID NO: 53545 - DNA, 21 bp, homo sapiens
cagatccaccactatcctaat

SEQ ID NO: 53546 - RNA, 21 nt, RNAi
gauccaccacuauccuaauuu

SEQ ID NO: 53547 - RNA, 21 nt, RNAi
uucuagguggugauaggauua

SEQ ID NO: 53548 - DNA, 21 bp, homo sapiens
cacctcatcgataaggtcatc

SEQ ID NO: 53549 - RNA, 21 nt, RNAi
ccucaucgauaaggucaucuu

SEQ ID NO: 53550 - RNA, 21 nt, RNAi
uuggaguagcuauuccaguag

SEQ ID NO: 53551 - DNA, 21 bp, homo sapiens
catcgataaggtcatctccac

SEQ ID NO: 53552 - RNA, 21 nt, RNAi
ucgauaaggucaucuccacuu

SEQ ID NO: 53553 - RNA, 21 nt, RNAi
uuagcuauuccaguagaggug

SEQ ID NO: 53554 - DNA, 21 bp, homo sapiens
catctccaccatcaccaacaa

SEQ ID NO: 53555 - RNA, 21 nt, RNAi
ucuccaccaucaccaacaauu

SEQ ID NO: 53556 - RNA, 21 nt, RNAi
uuagaggugguagugguuguu

SEQ ID NO: 53557 - DNA, 21 bp, homo sapiens
caccatcaccaacaacatcca

SEQ ID NO: 53558 - RNA, 21 nt, RNAi
ccaucaccaacaacauccauu

SEQ ID NO: 53559 - RNA, 21 nt, RNAi
uugguagugguuguuguaggu

SEQ ID NO: 53560 - DNA, 21 bp, homo sapiens
catcaccaacaacatccagca

SEQ ID NO: 53561 - RNA, 21 nt, RNAi
ucaccaacaacauccagcauu

SEQ ID NO: 53562 - RNA, 21 nt, RNAi
uuagugguuguuguaggucgu

SEQ ID NO: 53563 - DNA, 21 bp, homo sapiens
caccaacaacatccagcagat

SEQ ID NO: 53564 - RNA, 21 nt, RNAi
ccaacaacauccagcagauuu

SEQ ID NO: 53565 - RNA, 21 nt, RNAi
uugguuguuguaggucgucua

SEQ ID NO: 53566 - DNA, 21 bp, homo sapiens
caacaacatccagcagatcat

SEQ ID NO: 53567 - RNA, 21 nt, RNAi
acaacauccagcagaucauuu

SEQ ID NO: 53568 - RNA, 21 nt, RNAi
uuuguuguaggucgucuagua

SEQ ID NO: 53569 - DNA, 21 bp, homo sapiens
caacatccagcagatcattga

SEQ ID NO: 53570 - RNA, 21 nt, RNAi
acauccagcagaucauugauu

SEQ ID NO: 53571 - RNA, 21 nt, RNAi
uuuguaggucgucuaguaacu

SEQ ID NO: 53572 - DNA, 21 bp, homo sapiens
catccagcagatcattgagat

SEQ ID NO: 53573 - RNA, 21 nt, RNAi
uccagcagaucauugagauuu

SEQ ID NO: 53574 - RNA, 21 nt, RNAi
uuaggucgucuaguaacucua

SEQ ID NO: 53575 - DNA, 21 bp, homo sapiens
cagcagatcattgagatcgag

SEQ ID NO: 53576 - RNA, 21 nt, RNAi
gcagaucauugagaucgaguu

SEQ ID NO: 53577 - RNA, 21 nt, RNAi
uucgucuaguaacucuagcuc

SEQ ID NO: 53578 - DNA, 21 bp, homo sapiens
cagatcattgagatcgaggac

SEQ ID NO: 53579 - RNA, 21 nt, RNAi
gaucauugagaucgaggacuu

SEQ ID NO: 53580 - RNA, 21 nt, RNAi
uucuaguaacucuagcuccug

SEQ ID NO: 53581 - DNA, 21 bp, homo sapiens
cattgagatcgaggacacctt

SEQ ID NO: 53582 - RNA, 21 nt, RNAi
uugagaucgaggacaccuuuu

SEQ ID NO: 53583 - RNA, 21 nt, RNAi
uuaacucuagcuccuguggaa

SEQ ID NO: 53584 - DNA, 21 bp, homo sapiens
caacacgatgcttgaaggtaa

SEQ ID NO: 53585 - RNA, 21 nt, RNAi
acacgaugcuugaagguaauu

SEQ ID NO: 53586 - RNA, 21 nt, RNAi
uuugugcuacgaacuuccauu

SEQ ID NO: 53587 - DNA, 21 bp, homo sapiens
cacgatgcttgaaggtaacgg

SEQ ID NO: 53588 - RNA, 21 nt, RNAi
cgaugcuugaagguaacgguu

SEQ ID NO: 53589 - RNA, 21 nt, RNAi
uugcuacgaacuuccauugcc

SEQ ID NO: 53590 - DNA, 21 bp, homo sapiens
caatgaggccttcgagaagat

SEQ ID NO: 53591 - RNA, 21 nt, RNAi
augaggccuucgagaagauuu

SEQ ID NO: 53592 - RNA, 21 nt, RNAi
uuuacuccggaagcucuucua

SEQ ID NO: 53593 - DNA, 21 bp, homo sapiens
caaccacatcttgaagtcagc

SEQ ID NO: 53594 - RNA, 21 nt, RNAi
accacaucuugaagucagcuu

SEQ ID NO: 53595 - RNA, 21 nt, RNAi
uuugguguagaacuucagucg

SEQ ID NO: 53596 - DNA, 21 bp, homo sapiens
cacatcttgaagtcagctatg

SEQ ID NO: 53597 - RNA, 21 nt, RNAi
caucuugaagucagcuauguu

SEQ ID NO: 53598 - RNA, 21 nt, RNAi
uuguagaacuucagucgauac

SEQ ID NO: 53599 - DNA, 21 bp, homo sapiens
catcttgaagtcagctatgtg

SEQ ID NO: 53600 - RNA, 21 nt, RNAi
ucuugaagucagcuauguguu

SEQ ID NO: 53601 - RNA, 21 nt, RNAi
uuagaacuucagucgauacac

SEQ ID NO: 53602 - DNA, 21 bp, homo sapiens
cagctatgtgtgctgaagcca

SEQ ID NO: 53603 - RNA, 21 nt, RNAi
gcuaugugugcugaagccauu

SEQ ID NO: 53604 - RNA, 21 nt, RNAi
uucgauacacacgacuucggu

SEQ ID NO: 53605 - DNA, 21 bp, homo sapiens
catctccaataaagacatcct

SEQ ID NO: 53606 - RNA, 21 nt, RNAi
ucuccaauaaagacauccuuu

SEQ ID NO: 53607 - RNA, 21 nt, RNAi
uuagagguuauuucuguagga

SEQ ID NO: 53608 - DNA, 21 bp, homo sapiens
caataaagacatcctagccac

SEQ ID NO: 53609 - RNA, 21 nt, RNAi
auaaagacauccuagccacuu

SEQ ID NO: 53610 - RNA, 21 nt, RNAi
uuuauuucuguaggaucggug

SEQ ID NO: 53611 - DNA, 21 bp, homo sapiens
cactacattgatgagctactc

SEQ ID NO: 53612 - RNA, 21 nt, RNAi
cuacauugaugagcuacucuu

SEQ ID NO: 53613 - RNA, 21 nt, RNAi
uugauguaacuacucgaugag

SEQ ID NO: 53614 - DNA, 21 bp, homo sapiens
cagactcagccaagacactat

SEQ ID NO: 53615 - RNA, 21 nt, RNAi
gacucagccaagacacuauuu

SEQ ID NO: 53616 - RNA, 21 nt, RNAi
uucugagucgguucugugaua

SEQ ID NO: 53617 - DNA, 21 bp, homo sapiens
cagccaagacactatttgaat

SEQ ID NO: 53618 - RNA, 21 nt, RNAi
gccaagacacuauuugaauuu

SEQ ID NO: 53619 - RNA, 21 nt, RNAi
uucgguucugugauaaacuua

SEQ ID NO: 53620 - DNA, 21 bp, homo sapiens
caagacactatttgaattggc

SEQ ID NO: 53621 - RNA, 21 nt, RNAi
agacacuauuugaauuggcuu

SEQ ID NO: 53622 - RNA, 21 nt, RNAi
uuucugugauaaacuuaaccg

SEQ ID NO: 53623 - DNA, 21 bp, homo sapiens
cactatttgaattggctgcag

SEQ ID NO: 53624 - RNA, 21 nt, RNAi
cuauuugaauuggcugcaguu

SEQ ID NO: 53625 - RNA, 21 nt, RNAi
uugauaaacuuaaccgacguc

SEQ ID NO: 53626 - DNA, 21 bp, homo sapiens
cagagtctgatgtgtccacag

SEQ ID NO: 53627 - RNA, 21 nt, RNAi
gagucugauguguccacaguu

SEQ ID NO: 53628 - RNA, 21 nt, RNAi
uucucagacuacacagguguc

SEQ ID NO: 53629 - DNA, 21 bp, homo sapiens
caatcatctctctggaagtga

SEQ ID NO: 53630 - RNA, 21 nt, RNAi
aucaucucucuggaagugauu

SEQ ID NO: 53631 - RNA, 21 nt, RNAi
uuuaguagagagaccuucacu

SEQ ID NO: 53632 - DNA, 21 bp, homo sapiens
catctctctggaagtgagcgg

SEQ ID NO: 53633 - RNA, 21 nt, RNAi
ucucucuggaagugagcgguu

SEQ ID NO: 53634 - RNA, 21 nt, RNAi
uuagagagaccuucacucgcc

SEQ ID NO: 53635 - DNA, 21 bp, homo sapiens
catacaaggaatttgcttcgg

SEQ ID NO: 53636 - RNA, 21 nt, RNAi
uacaaggaauuugcuucgguu

SEQ ID NO: 53637 - RNA, 21 nt, RNAi
uuauguuccuuaaacgaagcc

SEQ ID NO: 53638 - DNA, 21 bp, homo sapiens
caaggaatttgcttcggaacc

SEQ ID NO: 53639 - RNA, 21 nt, RNAi
aggaauuugcuucggaaccuu

SEQ ID NO: 53640 - RNA, 21 nt, RNAi
uuuccuuaaacgaagccuugg

SEQ ID NO: 53641 - DNA, 21 bp, homo sapiens
cacataattaaagaccagctg

SEQ ID NO: 53642 - RNA, 21 nt, RNAi
cauaauuaaagaccagcuguu

SEQ ID NO: 53643 - RNA, 21 nt, RNAi
uuguauuaauuucuggucgac

SEQ ID NO: 53644 - DNA, 21 bp, homo sapiens
cataattaaagaccagctggc

SEQ ID NO: 53645 - RNA, 21 nt, RNAi
uaauuaaagaccagcuggcuu

SEQ ID NO: 53646 - RNA, 21 nt, RNAi
uuauuaauuucuggucgaccg

SEQ ID NO: 53647 - DNA, 21 bp, homo sapiens
cagctggcctctaagtatctg

SEQ ID NO: 53648 - RNA, 21 nt, RNAi
gcuggccucuaaguaucuguu

SEQ ID NO: 53649 - RNA, 21 nt, RNAi
uucgaccggagauucauagac

SEQ ID NO: 53650 - DNA, 21 bp, homo sapiens
cattgagaacagctgcatcgc

SEQ ID NO: 53651 - RNA, 21 nt, RNAi
uugagaacagcugcaucgcuu

SEQ ID NO: 53652 - RNA, 21 nt, RNAi
uuaacucuugucgacguagcg

SEQ ID NO: 53653 - DNA, 21 bp, homo sapiens
caatcgctttagcatgctggt

SEQ ID NO: 53654 - RNA, 21 nt, RNAi
aucgcuuuagcaugcugguuu

SEQ ID NO: 53655 - RNA, 21 nt, RNAi
uuuagcgaaaucguacgacca

SEQ ID NO: 53656 - DNA, 21 bp, homo sapiens
catgctggtagctgccatcca

SEQ ID NO: 53657 - RNA, 21 nt, RNAi
ugcugguagcugccauccauu

SEQ ID NO: 53658 - RNA, 21 nt, RNAi
uuacgaccaucgacgguaggu

SEQ ID NO: 53659 - DNA, 21 bp, homo sapiens
catccagtctgcaggactgac

SEQ ID NO: 53660 - RNA, 21 nt, RNAi
uccagucugcaggacugacuu

SEQ ID NO: 53661 - RNA, 21 nt, RNAi
uuaggucagacguccugacug

SEQ ID NO: 53662 - DNA, 21 bp, homo sapiens
cagtctgcaggactgacggag

SEQ ID NO: 53663 - RNA, 21 nt, RNAi
gucugcaggacugacggaguu

SEQ ID NO: 53664 - RNA, 21 nt, RNAi
uucagacguccugacugccuc

SEQ ID NO: 53665 - DNA, 21 bp, homo sapiens
cacaaatgaagccttccgagc

SEQ ID NO: 53666 - RNA, 21 nt, RNAi
caaaugaagccuuccgagcuu

SEQ ID NO: 53667 - RNA, 21 nt, RNAi
uuguuuacuucggaaggcucg

SEQ ID NO: 53668 - DNA, 21 bp, homo sapiens
caccaagagaacggagcagac

SEQ ID NO: 53669 - RNA, 21 nt, RNAi
ccaagagaacggagcagacuu

SEQ ID NO: 53670 - RNA, 21 nt, RNAi
uugguucucuugccucgucug

SEQ ID NO: 53671 - DNA, 21 bp, homo sapiens
caagagaacggagcagactct

SEQ ID NO: 53672 - RNA, 21 nt, RNAi
agagaacggagcagacucuuu

SEQ ID NO: 53673 - RNA, 21 nt, RNAi
uuucucuugccucgucugaga

SEQ ID NO: 53674 - DNA, 21 bp, homo sapiens
caaggaacttgccaacatcct

SEQ ID NO: 53675 - RNA, 21 nt, RNAi
aggaacuugccaacauccuuu

SEQ ID NO: 53676 - RNA, 21 nt, RNAi
uuuccuugaacgguuguagga

SEQ ID NO: 53677 - DNA, 21 bp, homo sapiens
caacatcctgaaataccacat

SEQ ID NO: 53678 - RNA, 21 nt, RNAi
acauccugaaauaccacauuu

SEQ ID NO: 53679 - RNA, 21 nt, RNAi
uuuguaggacuuuauggugua

SEQ ID NO: 53680 - DNA, 21 bp, homo sapiens
catcctgaaataccacattgg

SEQ ID NO: 53681 - RNA, 21 nt, RNAi
uccugaaauaccacauugguu

SEQ ID NO: 53682 - RNA, 21 nt, RNAi
uuaggacuuuaugguguaacc

SEQ ID NO: 53683 - DNA, 21 bp, homo sapiens
cacattggtgatgaaatcctg

SEQ ID NO: 53684 - RNA, 21 nt, RNAi
cauuggugaugaaauccuguu

SEQ ID NO: 53685 - RNA, 21 nt, RNAi
uuguaaccacuacuuuaggac

SEQ ID NO: 53686 - DNA, 21 bp, homo sapiens
cattggtgatgaaatcctggt

SEQ ID NO: 53687 - RNA, 21 nt, RNAi
uuggugaugaaauccugguuu

SEQ ID NO: 53688 - RNA, 21 nt, RNAi
uuaaccacuacuuuaggacca

SEQ ID NO: 53689 - DNA, 21 bp, homo sapiens
caaggtgacaagctggaagtc

SEQ ID NO: 53690 - RNA, 21 nt, RNAi
aggugacaagcuggaagucuu

SEQ ID NO: 53691 - RNA, 21 nt, RNAi
uuuccacuguucgaccuucag

SEQ ID NO: 53692 - DNA, 21 bp, homo sapiens
caagctggaagtcagcttgaa

SEQ ID NO: 53693 - RNA, 21 nt, RNAi
agcuggaagucagcuugaauu

SEQ ID NO: 53694 - RNA, 21 nt, RNAi
uuucgaccuucagucgaacuu

SEQ ID NO: 53695 - DNA, 21 bp, homo sapiens
caatgtggtgagtgtcaacaa

SEQ ID NO: 53696 - RNA, 21 nt, RNAi
auguggugagugucaacaauu

SEQ ID NO: 53697 - RNA, 21 nt, RNAi
uuuacaccacucacaguuguu

SEQ ID NO: 53698 - DNA, 21 bp, homo sapiens
caacaaggagcctgttgccga

SEQ ID NO: 53699 - RNA, 21 nt, RNAi
acaaggagccuguugccgauu

SEQ ID NO: 53700 - RNA, 21 nt, RNAi
uuuguuccucggacaacggcu

SEQ ID NO: 53701 - DNA, 21 bp, homo sapiens
catcatggccacaaatggcgt

SEQ ID NO: 53702 - RNA, 21 nt, RNAi
ucauggccacaaauggcguuu

SEQ ID NO: 53703 - RNA, 21 nt, RNAi
uuaguaccgguguuuaccgca

SEQ ID NO: 53704 - DNA, 21 bp, homo sapiens
catggccacaaatggcgtggt

SEQ ID NO: 53705 - RNA, 21 nt, RNAi
uggccacaaauggcgugguuu

SEQ ID NO: 53706 - RNA, 21 nt, RNAi
uuaccgguguuuaccgcacca

SEQ ID NO: 53707 - DNA, 21 bp, homo sapiens
cacaaatggcgtggtccatgt

SEQ ID NO: 53708 - RNA, 21 nt, RNAi
caaauggcgugguccauguuu

SEQ ID NO: 53709 - RNA, 21 nt, RNAi
uuguuuaccgcaccagguaca

SEQ ID NO: 53710 - DNA, 21 bp, homo sapiens
caaatggcgtggtccatgtca

SEQ ID NO: 53711 - RNA, 21 nt, RNAi
aauggcgugguccaugucauu

SEQ ID NO: 53712 - RNA, 21 nt, RNAi
uuuuaccgcaccagguacagu

SEQ ID NO: 53713 - DNA, 21 bp, homo sapiens
catgtcatcaccaatgttctg

SEQ ID NO: 53714 - RNA, 21 nt, RNAi
ugucaucaccaauguucuguu

SEQ ID NO: 53715 - RNA, 21 nt, RNAi
uuacaguagugguuacaagac

SEQ ID NO: 53716 - DNA, 21 bp, homo sapiens
catcaccaatgttctgcagcc

SEQ ID NO: 53717 - RNA, 21 nt, RNAi
ucaccaauguucugcagccuu

SEQ ID NO: 53718 - RNA, 21 nt, RNAi
uuagugguuacaagacgucgg

SEQ ID NO: 53719 - DNA, 21 bp, homo sapiens
caccaatgttctgcagcctcc

SEQ ID NO: 53720 - RNA, 21 nt, RNAi
ccaauguucugcagccuccuu

SEQ ID NO: 53721 - RNA, 21 nt, RNAi
uugguuacaagacgucggagg

SEQ ID NO: 53722 - DNA, 21 bp, homo sapiens
caatgttctgcagcctccagc

SEQ ID NO: 53723 - RNA, 21 nt, RNAi
auguucugcagccuccagcuu

SEQ ID NO: 53724 - RNA, 21 nt, RNAi
uuuacaagacgucggaggucg

SEQ ID NO: 53725 - DNA, 21 bp, homo sapiens
cagcctccagccaacagacct

SEQ ID NO: 53726 - RNA, 21 nt, RNAi
gccuccagccaacagaccuuu

SEQ ID NO: 53727 - RNA, 21 nt, RNAi
uucggaggucgguugucugga

SEQ ID NO: 53728 - DNA, 21 bp, homo sapiens
cagccaacagacctcaggaaa

SEQ ID NO: 53729 - RNA, 21 nt, RNAi
gccaacagaccucaggaaauu

SEQ ID NO: 53730 - RNA, 21 nt, RNAi
uucgguugucuggaguccuuu

SEQ ID NO: 53731 - DNA, 21 bp, homo sapiens
caacagacctcaggaaagagg

SEQ ID NO: 53732 - RNA, 21 nt, RNAi
acagaccucaggaaagagguu

SEQ ID NO: 53733 - RNA, 21 nt, RNAi
uuugucuggaguccuuucucc

SEQ ID NO: 53734 - DNA, 21 bp, homo sapiens
cagactctgcgcttgagatct

SEQ ID NO: 53735 - RNA, 21 nt, RNAi
gacucugcgcuugagaucuuu

SEQ ID NO: 53736 - RNA, 21 nt, RNAi
uucugagacgcgaacucuaga

SEQ ID NO: 53737 - DNA, 21 bp, homo sapiens
cagaggtctgtgcgactagcc

SEQ ID NO: 53738 - RNA, 21 nt, RNAi
gaggucugugcgacuagccuu

SEQ ID NO: 53739 - RNA, 21 nt, RNAi
uucuccagacacgcugaucgg

SEQ ID NO: 53740 - DNA, 21 bp, homo sapiens
cattagcttgaagcactacag

SEQ ID NO: 53741 - RNA, 21 nt, RNAi
uuagcuugaagcacuacaguu

SEQ ID NO: 53742 - RNA, 21 nt, RNAi
uuaaucgaacuucgugauguc

SEQ ID NO: 53743 - DNA, 21 bp, homo sapiens
cactacaggaggaatgcacca

SEQ ID NO: 53744 - RNA, 21 nt, RNAi
cuacaggaggaaugcaccauu

SEQ ID NO: 53745 - RNA, 21 nt, RNAi
uugauguccuccuuacguggu

SEQ ID NO: 53746 - DNA, 21 bp, homo sapiens
caggaggaatgcaccacggca

SEQ ID NO: 53747 - RNA, 21 nt, RNAi
ggaggaaugcaccacggcauu

SEQ ID NO: 53748 - RNA, 21 nt, RNAi
uuccuccuuacguggugccgu

SEQ ID NO: 53749 - DNA, 21 bp, homo sapiens
cacggcagctctccgccaatt

SEQ ID NO: 53750 - RNA, 21 nt, RNAi
cggcagcucuccgccaauuuu

SEQ ID NO: 53751 - RNA, 21 nt, RNAi
uugccgucgagaggcgguuaa

SEQ ID NO: 53752 - DNA, 21 bp, homo sapiens
cagctctccgccaatttctct

SEQ ID NO: 53753 - RNA, 21 nt, RNAi
gcucuccgccaauuucucuuu

SEQ ID NO: 53754 - RNA, 21 nt, RNAi
uucgagaggcgguuaaagaga

SEQ ID NO: 53755 - DNA, 21 bp, homo sapiens
caatttctctcagatttccac

SEQ ID NO: 53756 - RNA, 21 nt, RNAi
auuucucucagauuuccacuu

SEQ ID NO: 53757 - RNA, 21 nt, RNAi
uuuaaagagagucuaaaggug

SEQ ID NO: 53758 - DNA, 21 bp, homo sapiens
cagatttccacagagactgtt

SEQ ID NO: 53759 - RNA, 21 nt, RNAi
gauuuccacagagacuguuuu

SEQ ID NO: 53760 - RNA, 21 nt, RNAi
uucuaaaggugucucugacaa

SEQ ID NO: 53761 - DNA, 21 bp, homo sapiens
cacagagactgtttgaatgtt

SEQ ID NO: 53762 - RNA, 21 nt, RNAi
cagagacuguuugaauguuuu

SEQ ID NO: 53763 - RNA, 21 nt, RNAi
uugucucugacaaacuuacaa

SEQ ID NO: 53764 - DNA, 21 bp, homo sapiens
caccataatgagatgtgagcc

SEQ ID NO: 53765 - RNA, 21 nt, RNAi
ccauaaugagaugugagccuu

SEQ ID NO: 53766 - RNA, 21 nt, RNAi
uugguauuacucuacacucgg

SEQ ID NO: 53767 - DNA, 21 bp, homo sapiens
cataatgagatgtgagccttg

SEQ ID NO: 53768 - RNA, 21 nt, RNAi
uaaugagaugugagccuuguu

SEQ ID NO: 53769 - RNA, 21 nt, RNAi
uuauuacucuacacucggaac

SEQ ID NO: 53770 - DNA, 21 bp, homo sapiens
cactgcatgcagaaacttgga

SEQ ID NO: 53771 - RNA, 21 nt, RNAi
cugcaugcagaaacuuggauu

SEQ ID NO: 53772 - RNA, 21 nt, RNAi
uugacguacgucuuugaaccu

SEQ ID NO: 53773 - DNA, 21 bp, homo sapiens
catgcagaaacttggatgtca

SEQ ID NO: 53774 - RNA, 21 nt, RNAi
ugcagaaacuuggaugucauu

SEQ ID NO: 53775 - RNA, 21 nt, RNAi
uuacgucuuugaaccuacagu

SEQ ID NO: 53776 - DNA, 21 bp, homo sapiens
cagaaacttggatgtcactgc

SEQ ID NO: 53777 - RNA, 21 nt, RNAi
gaaacuuggaugucacugcuu

SEQ ID NO: 53778 - RNA, 21 nt, RNAi
uucuuugaaccuacagugacg

SEQ ID NO: 53779 - DNA, 21 bp, homo sapiens
cactgcctgacattcacttcc

SEQ ID NO: 53780 - RNA, 21 nt, RNAi
cugccugacauucacuuccuu

SEQ ID NO: 53781 - RNA, 21 nt, RNAi
uugacggacuguaagugaagg

SEQ ID NO: 53782 - DNA, 21 bp, homo sapiens
cattcacttccagagaggacc

SEQ ID NO: 53783 - RNA, 21 nt, RNAi
uucacuuccagagaggaccuu

SEQ ID NO: 53784 - RNA, 21 nt, RNAi
uuaagugaaggucucuccugg

SEQ ID NO: 53785 - DNA, 21 bp, homo sapiens
cacttccagagaggacctatc

SEQ ID NO: 53786 - RNA, 21 nt, RNAi
cuuccagagaggaccuaucuu

SEQ ID NO: 53787 - RNA, 21 nt, RNAi
uugaaggucucuccuggauag

SEQ ID NO: 53788 - DNA, 21 bp, homo sapiens
caaatgtggaattgactgcct

SEQ ID NO: 53789 - RNA, 21 nt, RNAi
aauguggaauugacugccuuu

SEQ ID NO: 53790 - RNA, 21 nt, RNAi
uuuuacaccuuaacugacgga

SEQ ID NO: 53791 - DNA, 21 bp, homo sapiens
catgaatcaagcaatccagcc

SEQ ID NO: 53792 - RNA, 21 nt, RNAi
ugaaucaagcaauccagccuu

SEQ ID NO: 53793 - RNA, 21 nt, RNAi
uuacuuaguucguuaggucgg

SEQ ID NO: 53794 - DNA, 21 bp, homo sapiens
cacagctggagaaatggcatc

SEQ ID NO: 53795 - RNA, 21 nt, RNAi
cagcuggagaaauggcaucuu

SEQ ID NO: 53796 - RNA, 21 nt, RNAi
uugucgaccucuuuaccguag

SEQ ID NO: 53797 - DNA, 21 bp, homo sapiens
cagctggagaaatggcatcat

SEQ ID NO: 53798 - RNA, 21 nt, RNAi
gcuggagaaauggcaucauuu

SEQ ID NO: 53799 - RNA, 21 nt, RNAi
uucgaccucuuuaccguagua

SEQ ID NO: 53800 - DNA, 21 bp, homo sapiens
caaatgtgtctcacatctaca

SEQ ID NO: 53801 - RNA, 21 nt, RNAi
aaugugucucacaucuacauu

SEQ ID NO: 53802 - RNA, 21 nt, RNAi
uuuuacacagaguguagaugu

SEQ ID NO: 53803 - DNA, 21 bp, homo sapiens
cacatctacacgtggcttgga

SEQ ID NO: 53804 - RNA, 21 nt, RNAi
caucuacacguggcuuggauu

SEQ ID NO: 53805 - RNA, 21 nt, RNAi
uuguagaugugcaccgaaccu

SEQ ID NO: 53806 - DNA, 21 bp, homo sapiens
catctacacgtggcttggagg

SEQ ID NO: 53807 - RNA, 21 nt, RNAi
ucuacacguggcuuggagguu

SEQ ID NO: 53808 - RNA, 21 nt, RNAi
uuagaugugcaccgaaccucc

SEQ ID NO: 53809 - DNA, 21 bp, homo sapiens
cagagccatggtgtgtttgta

SEQ ID NO: 53810 - RNA, 21 nt, RNAi
gagccaugguguguuuguauu

SEQ ID NO: 53811 - RNA, 21 nt, RNAi
uucucgguaccacacaaacau

SEQ ID NO: 53812 - DNA, 21 bp, homo sapiens
gaaggttattggcactaatag

SEQ ID NO: 53813 - RNA, 21 nt, RNAi
agguuauuggcacuaauaguu

SEQ ID NO: 53814 - RNA, 21 nt, RNAi
uuuccaauaaccgugauuauc

SEQ ID NO: 53815 - DNA, 21 bp, homo sapiens
gaagtacttcaccaactgcaa

SEQ ID NO: 53816 - RNA, 21 nt, RNAi
aguacuucaccaacugcaauu

SEQ ID NO: 53817 - RNA, 21 nt, RNAi
uuucaugaagugguugacguu

SEQ ID NO: 53818 - DNA, 21 bp, homo sapiens
gagtgctgtcctggatatgaa

SEQ ID NO: 53819 - RNA, 21 nt, RNAi
gugcuguccuggauaugaauu

SEQ ID NO: 53820 - RNA, 21 nt, RNAi
uucacgacaggaccuauacuu

SEQ ID NO: 53821 - DNA, 21 bp, homo sapiens
gagtcgttggatccaccacca

SEQ ID NO: 53822 - RNA, 21 nt, RNAi
gucguuggauccaccaccauu

SEQ ID NO: 53823 - RNA, 21 nt, RNAi
uucagcaaccuaggugguggu

SEQ ID NO: 53824 - DNA, 21 bp, homo sapiens
gatccaccaccactcagctgt

SEQ ID NO: 53825 - RNA, 21 nt, RNAi
uccaccaccacucagcuguuu

SEQ ID NO: 53826 - RNA, 21 nt, RNAi
uuaggugguggugagucgaca

SEQ ID NO: 53827 - DNA, 21 bp, homo sapiens
gagaagctgaggcctgagatg

SEQ ID NO: 53828 - RNA, 21 nt, RNAi
gaagcugaggccugagauguu

SEQ ID NO: 53829 - RNA, 21 nt, RNAi
uucuucgacuccggacucuac

SEQ ID NO: 53830 - DNA, 21 bp, homo sapiens
gaagctgaggcctgagatgga

SEQ ID NO: 53831 - RNA, 21 nt, RNAi
agcugaggccugagauggauu

SEQ ID NO: 53832 - RNA, 21 nt, RNAi
uuucgacuccggacucuaccu

SEQ ID NO: 53833 - DNA, 21 bp, homo sapiens
gagtcctgactgatgagctga

SEQ ID NO: 53834 - RNA, 21 nt, RNAi
guccugacugaugagcugauu

SEQ ID NO: 53835 - RNA, 21 nt, RNAi
uucaggacugacuacucgacu

SEQ ID NO: 53836 - DNA, 21 bp, homo sapiens
gactgatgagctgaaacacgg

SEQ ID NO: 53837 - RNA, 21 nt, RNAi
cugaugagcugaaacacgguu

SEQ ID NO: 53838 - RNA, 21 nt, RNAi
uugacuacucgacuuugugcc

SEQ ID NO: 53839 - DNA, 21 bp, homo sapiens
gatgagctgaaacacggcatg

SEQ ID NO: 53840 - RNA, 21 nt, RNAi
ugagcugaaacacggcauguu

SEQ ID NO: 53841 - RNA, 21 nt, RNAi
uuacucgacuuugugccguac

SEQ ID NO: 53842 - DNA, 21 bp, homo sapiens
gagctgaaacacggcatgacc

SEQ ID NO: 53843 - RNA, 21 nt, RNAi
gcugaaacacggcaugaccuu

SEQ ID NO: 53844 - RNA, 21 nt, RNAi
uucgacuuugugccguacugg

SEQ ID NO: 53845 - DNA, 21 bp, homo sapiens
gaattccaacatccagatcca

SEQ ID NO: 53846 - RNA, 21 nt, RNAi
auuccaacauccagauccauu

SEQ ID NO: 53847 - RNA, 21 nt, RNAi
uuuaagguuguaggucuaggu

SEQ ID NO: 53848 - DNA, 21 bp, homo sapiens
gatccaccactatcctaatgg

SEQ ID NO: 53849 - RNA, 21 nt, RNAi
uccaccacuauccuaaugguu

SEQ ID NO: 53850 - RNA, 21 nt, RNAi
uuagguggugauaggauuacc

SEQ ID NO: 53851 - DNA, 21 bp, homo sapiens
gattgtaactgtgaactgtgc

SEQ ID NO: 53852 - RNA, 21 nt, RNAi
uuguaacugugaacugugcuu

SEQ ID NO: 53853 - RNA, 21 nt, RNAi
uuaacauugacacuugacacg

SEQ ID NO: 53854 - DNA, 21 bp, homo sapiens
gaaagccgaccaccatgcaac

SEQ ID NO: 53855 - RNA, 21 nt, RNAi
aagccgaccaccaugcaacuu

SEQ ID NO: 53856 - RNA, 21 nt, RNAi
uuuucggcuggugguacguug

SEQ ID NO: 53857 - DNA, 21 bp, homo sapiens
gataaggtcatctccaccatc

SEQ ID NO: 53858 - RNA, 21 nt, RNAi
uaaggucaucuccaccaucuu

SEQ ID NO: 53859 - RNA, 21 nt, RNAi
uuauuccaguagaggugguag

SEQ ID NO: 53860 - DNA, 21 bp, homo sapiens
gatcattgagatcgaggacac

SEQ ID NO: 53861 - RNA, 21 nt, RNAi
ucauugagaucgaggacacuu

SEQ ID NO: 53862 - RNA, 21 nt, RNAi
uuaguaacucuagcuccugug

SEQ ID NO: 53863 - DNA, 21 bp, homo sapiens
gagatcgaggacacctttgag

SEQ ID NO: 53864 - RNA, 21 nt, RNAi
gaucgaggacaccuuugaguu

SEQ ID NO: 53865 - RNA, 21 nt, RNAi
uucuagcuccuguggaaacuc

SEQ ID NO: 53866 - DNA, 21 bp, homo sapiens
gatcgaggacacctttgagac

SEQ ID NO: 53867 - RNA, 21 nt, RNAi
ucgaggacaccuuugagacuu

SEQ ID NO: 53868 - RNA, 21 nt, RNAi
uuagcuccuguggaaacucug

SEQ ID NO: 53869 - DNA, 21 bp, homo sapiens
gatgcttgaaggtaacggcca

SEQ ID NO: 53870 - RNA, 21 nt, RNAi
ugcuugaagguaacggccauu

SEQ ID NO: 53871 - RNA, 21 nt, RNAi
uuacgaacuuccauugccggu

SEQ ID NO: 53872 - DNA, 21 bp, homo sapiens
gaaggtaacggccagtacacg

SEQ ID NO: 53873 - RNA, 21 nt, RNAi
agguaacggccaguacacguu

SEQ ID NO: 53874 - RNA, 21 nt, RNAi
uuuccauugccggucaugugc

SEQ ID NO: 53875 - DNA, 21 bp, homo sapiens
gaccaatgaggccttcgagaa

SEQ ID NO: 53876 - RNA, 21 nt, RNAi
ccaaugaggccuucgagaauu

SEQ ID NO: 53877 - RNA, 21 nt, RNAi
uugguuacuccggaagcucuu

SEQ ID NO: 53878 - DNA, 21 bp, homo sapiens
gagactttgaaccgtatcctg

SEQ ID NO: 53879 - RNA, 21 nt, RNAi
gacuuugaaccguauccuguu

SEQ ID NO: 53880 - RNA, 21 nt, RNAi
uucugaaacuuggcauaggac

SEQ ID NO: 53881 - DNA, 21 bp, homo sapiens
gagagacctgctgaacaacca

SEQ ID NO: 53882 - RNA, 21 nt, RNAi
gagaccugcugaacaaccauu

SEQ ID NO: 53883 - RNA, 21 nt, RNAi
uucucuggacgacuuguuggu

SEQ ID NO: 53884 - DNA, 21 bp, homo sapiens
gagacctgctgaacaaccaca

SEQ ID NO: 53885 - RNA, 21 nt, RNAi
gaccugcugaacaaccacauu

SEQ ID NO: 53886 - RNA, 21 nt, RNAi
uucuggacgacuuguuggugu

SEQ ID NO: 53887 - DNA, 21 bp, homo sapiens
gacctgctgaacaaccacatc

SEQ ID NO: 53888 - RNA, 21 nt, RNAi
ccugcugaacaaccacaucuu

SEQ ID NO: 53889 - RNA, 21 nt, RNAi
uuggacgacuuguugguguag

SEQ ID NO: 53890 - DNA, 21 bp, homo sapiens
gaacaaccacatcttgaagtc

SEQ ID NO: 53891 - RNA, 21 nt, RNAi
acaaccacaucuugaagucuu

SEQ ID NO: 53892 - RNA, 21 nt, RNAi
uuuguugguguagaacuucag

SEQ ID NO: 53893 - DNA, 21 bp, homo sapiens
gaagtcagctatgtgtgctga

SEQ ID NO: 53894 - RNA, 21 nt, RNAi
agucagcuaugugugcugauu

SEQ ID NO: 53895 - RNA, 21 nt, RNAi
uuucagucgauacacacgacu

SEQ ID NO: 53896 - DNA, 21 bp, homo sapiens
gaaggcgatcatctccaataa

SEQ ID NO: 53897 - RNA, 21 nt, RNAi
aggcgaucaucuccaauaauu

SEQ ID NO: 53898 - RNA, 21 nt, RNAi
uuuccgcuaguagagguuauu

SEQ ID NO: 53899 - DNA, 21 bp, homo sapiens
gatcatctccaataaagacat

SEQ ID NO: 53900 - RNA, 21 nt, RNAi
ucaucuccaauaaagacauuu

SEQ ID NO: 53901 - RNA, 21 nt, RNAi
uuaguagagguuauuucugua

SEQ ID NO: 53902 - DNA, 21 bp, homo sapiens
gatccactacattgatgagct

SEQ ID NO: 53903 - RNA, 21 nt, RNAi
uccacuacauugaugagcuuu

SEQ ID NO: 53904 - RNA, 21 nt, RNAi
uuaggugauguaacuacucga

SEQ ID NO: 53905 - DNA, 21 bp, homo sapiens
gactcagccaagacactattt

SEQ ID NO: 53906 - RNA, 21 nt, RNAi
cucagccaagacacuauuuuu

SEQ ID NO: 53907 - RNA, 21 nt, RNAi
uugagucgguucugugauaaa

SEQ ID NO: 53908 - DNA, 21 bp, homo sapiens
gacactatttgaattggctgc

SEQ ID NO: 53909 - RNA, 21 nt, RNAi
cacuauuugaauuggcugcuu

SEQ ID NO: 53910 - RNA, 21 nt, RNAi
uugugauaaacuuaaccgacg

SEQ ID NO: 53911 - DNA, 21 bp, homo sapiens
gaattggctgcagagtctgat

SEQ ID NO: 53912 - RNA, 21 nt, RNAi
auuggcugcagagucugauuu

SEQ ID NO: 53913 - RNA, 21 nt, RNAi
uuuaaccgacgucucagacua

SEQ ID NO: 53914 - DNA, 21 bp, homo sapiens
gagtctgatgtgtccacagcc

SEQ ID NO: 53915 - RNA, 21 nt, RNAi
gucugauguguccacagccuu

SEQ ID NO: 53916 - RNA, 21 nt, RNAi
uucagacuacacaggugucgg

SEQ ID NO: 53917 - DNA, 21 bp, homo sapiens
gatgtgtccacagccattgac

SEQ ID NO: 53918 - RNA, 21 nt, RNAi
uguguccacagccauugacuu

SEQ ID NO: 53919 - RNA, 21 nt, RNAi
uuacacaggugucgguaacug

SEQ ID NO: 53920 - DNA, 21 bp, homo sapiens
gaattctgtattcaaagatgg

SEQ ID NO: 53921 - RNA, 21 nt, RNAi
auucuguauucaaagaugguu

SEQ ID NO: 53922 - RNA, 21 nt, RNAi
uuuaagacauaaguuucuacc

SEQ ID NO: 53923 - DNA, 21 bp, homo sapiens
gaatttgcttcggaaccacat

SEQ ID NO: 53924 - RNA, 21 nt, RNAi
auuugcuucggaaccacauuu

SEQ ID NO: 53925 - RNA, 21 nt, RNAi
uuuaaacgaagccuuggugua

SEQ ID NO: 53926 - DNA, 21 bp, homo sapiens
gaaccacataattaaagacca

SEQ ID NO: 53927 - RNA, 21 nt, RNAi
accacauaauuaaagaccauu

SEQ ID NO: 53928 - RNA, 21 nt, RNAi
uuugguguauuaauuucuggu

SEQ ID NO: 53929 - DNA, 21 bp, homo sapiens
gaccagctggcctctaagtat

SEQ ID NO: 53930 - RNA, 21 nt, RNAi
ccagcuggccucuaaguauuu

SEQ ID NO: 53931 - RNA, 21 nt, RNAi
uuggucgaccggagauucaua

SEQ ID NO: 53932 - DNA, 21 bp, homo sapiens
gactgtcatggatgtcctgaa

SEQ ID NO: 53933 - RNA, 21 nt, RNAi
cugucauggauguccugaauu

SEQ ID NO: 53934 - RNA, 21 nt, RNAi
uugacaguaccuacaggacuu

SEQ ID NO: 53935 - DNA, 21 bp, homo sapiens
gagacaatcgctttagcatgc

SEQ ID NO: 53936 - RNA, 21 nt, RNAi
gacaaucgcuuuagcaugcuu

SEQ ID NO: 53937 - RNA, 21 nt, RNAi
uucuguuagcgaaaucguacg

SEQ ID NO: 53938 - DNA, 21 bp, homo sapiens
gacaatcgctttagcatgctg

SEQ ID NO: 53939 - RNA, 21 nt, RNAi
caaucgcuuuagcaugcuguu

SEQ ID NO: 53940 - RNA, 21 nt, RNAi
uuguuagcgaaaucguacgac

SEQ ID NO: 53941 - DNA, 21 bp, homo sapiens
gaaggagtctacacagtcttc

SEQ ID NO: 53942 - RNA, 21 nt, RNAi
aggagucuacacagucuucuu

SEQ ID NO: 53943 - RNA, 21 nt, RNAi
uuuccucagaugugucagaag

SEQ ID NO: 53944 - DNA, 21 bp, homo sapiens
gagtctacacagtcttcgctc

SEQ ID NO: 53945 - RNA, 21 nt, RNAi
gucuacacagucuucgcucuu

SEQ ID NO: 53946 - RNA, 21 nt, RNAi
uucagaugugucagaagcgag

SEQ ID NO: 53947 - DNA, 21 bp, homo sapiens
gagaacggagcagactcttgg

SEQ ID NO: 53948 - RNA, 21 nt, RNAi
gaacggagcagacucuugguu

SEQ ID NO: 53949 - RNA, 21 nt, RNAi
uucuugccucgucugagaacc

SEQ ID NO: 53950 - DNA, 21 bp, homo sapiens
gagatgccaaggaacttgcca

SEQ ID NO: 53951 - RNA, 21 nt, RNAi
gaugccaaggaacuugccauu

SEQ ID NO: 53952 - RNA, 21 nt, RNAi
uucuacgguuccuugaacggu

SEQ ID NO: 53953 - DNA, 21 bp, homo sapiens
gatgccaaggaacttgccaac

SEQ ID NO: 53954 - RNA, 21 nt, RNAi
ugccaaggaacuugccaacuu

SEQ ID NO: 53955 - RNA, 21 nt, RNAi
uuacgguuccuugaacgguug

SEQ ID NO: 53956 - DNA, 21 bp, homo sapiens
gaacttgccaacatcctgaaa

SEQ ID NO: 53957 - RNA, 21 nt, RNAi
acuugccaacauccugaaauu

SEQ ID NO: 53958 - RNA, 21 nt, RNAi
uuugaacgguuguaggacuuu

SEQ ID NO: 53959 - DNA, 21 bp, homo sapiens
gaaataccacattggtgatga

SEQ ID NO: 53960 - RNA, 21 nt, RNAi
aauaccacauuggugaugauu

SEQ ID NO: 53961 - RNA, 21 nt, RNAi
uuuuaugguguaaccacuacu

SEQ ID NO: 53962 - DNA, 21 bp, homo sapiens
gatgaaatcctggttagcgga

SEQ ID NO: 53963 - RNA, 21 nt, RNAi
ugaaauccugguuagcggauu

SEQ ID NO: 53964 - RNA, 21 nt, RNAi
uuacuuuaggaccaaucgccu

SEQ ID NO: 53965 - DNA, 21 bp, homo sapiens
gaaatcctggttagcggaggc

SEQ ID NO: 53966 - RNA, 21 nt, RNAi
aauccugguuagcggaggcuu

SEQ ID NO: 53967 - RNA, 21 nt, RNAi
uuuuaggaccaaucgccuccg

SEQ ID NO: 53968 - DNA, 21 bp, homo sapiens
gacaagctggaagtcagcttg

SEQ ID NO: 53969 - RNA, 21 nt, RNAi
caagcuggaagucagcuuguu

SEQ ID NO: 53970 - RNA, 21 nt, RNAi
uuguucgaccuucagucgaac

SEQ ID NO: 53971 - DNA, 21 bp, homo sapiens
gagtgtcaacaaggagcctgt

SEQ ID NO: 53972 - RNA, 21 nt, RNAi
gugucaacaaggagccuguuu

SEQ ID NO: 53973 - RNA, 21 nt, RNAi
uucacaguuguuccucggaca

SEQ ID NO: 53974 - DNA, 21 bp, homo sapiens
gagcctgacatcatggccaca

SEQ ID NO: 53975 - RNA, 21 nt, RNAi
gccugacaucauggccacauu

SEQ ID NO: 53976 - RNA, 21 nt, RNAi
uucggacuguaguaccggugu

SEQ ID NO: 53977 - DNA, 21 bp, homo sapiens
gacatcatggccacaaatggc

SEQ ID NO: 53978 - RNA, 21 nt, RNAi
caucauggccacaaauggcuu

SEQ ID NO: 53979 - RNA, 21 nt, RNAi
uuguaguaccgguguuuaccg

SEQ ID NO: 53980 - DNA, 21 bp, homo sapiens
gatgaacttgcagactctgcg

SEQ ID NO: 53981 - RNA, 21 nt, RNAi
ugaacuugcagacucugcguu

SEQ ID NO: 53982 - RNA, 21 nt, RNAi
uuacuugaacgucugagacgc

SEQ ID NO: 53983 - DNA, 21 bp, homo sapiens
gaacttgcagactctgcgctt

SEQ ID NO: 53984 - RNA, 21 nt, RNAi
acuugcagacucugcgcuuuu

SEQ ID NO: 53985 - RNA, 21 nt, RNAi
uuugaacgucugagacgcgaa

SEQ ID NO: 53986 - DNA, 21 bp, homo sapiens
gactctgcgcttgagatcttc

SEQ ID NO: 53987 - RNA, 21 nt, RNAi
cucugcgcuugagaucuucuu

SEQ ID NO: 53988 - RNA, 21 nt, RNAi
uugagacgcgaacucuagaag

SEQ ID NO: 53989 - DNA, 21 bp, homo sapiens
gagatcttcaaacaagcatca

SEQ ID NO: 53990 - RNA, 21 nt, RNAi
gaucuucaaacaagcaucauu

SEQ ID NO: 53991 - RNA, 21 nt, RNAi
uucuagaaguuuguucguagu

SEQ ID NO: 53992 - DNA, 21 bp, homo sapiens
gatcttcaaacaagcatcagc

SEQ ID NO: 53993 - RNA, 21 nt, RNAi
ucuucaaacaagcaucagcuu

SEQ ID NO: 53994 - RNA, 21 nt, RNAi
uuagaaguuuguucguagucg

SEQ ID NO: 53995 - DNA, 21 bp, homo sapiens
gagaggatgaagcattagctt

SEQ ID NO: 53996 - RNA, 21 nt, RNAi
gaggaugaagcauuagcuuuu

SEQ ID NO: 53997 - RNA, 21 nt, RNAi
uucuccuacuucguaaucgaa

SEQ ID NO: 53998 - DNA, 21 bp, homo sapiens
gaggatgaagcattagcttga

SEQ ID NO: 53999 - RNA, 21 nt, RNAi
ggaugaagcauuagcuugauu

SEQ ID NO: 54000 - RNA, 21 nt, RNAi
uuccuacuucguaaucgaacu

SEQ ID NO: 54001 - DNA, 21 bp, homo sapiens
gatgaagcattagcttgaagc

SEQ ID NO: 54002 - RNA, 21 nt, RNAi
ugaagcauuagcuugaagcuu

SEQ ID NO: 54003 - RNA, 21 nt, RNAi
uuacuucguaaucgaacuucg

SEQ ID NO: 54004 - DNA, 21 bp, homo sapiens
gaagcattagcttgaagcact

SEQ ID NO: 54005 - RNA, 21 nt, RNAi
agcauuagcuugaagcacuuu

SEQ ID NO: 54006 - RNA, 21 nt, RNAi
uuucguaaucgaacuucguga

SEQ ID NO: 54007 - DNA, 21 bp, homo sapiens
gaagcactacaggaggaatgc

SEQ ID NO: 54008 - RNA, 21 nt, RNAi
agcacuacaggaggaaugcuu

SEQ ID NO: 54009 - RNA, 21 nt, RNAi
uuucgugauguccuccuuacg

SEQ ID NO: 54010 - DNA, 21 bp, homo sapiens
gaggaatgcaccacggcagct

SEQ ID NO: 54011 - RNA, 21 nt, RNAi
ggaaugcaccacggcagcuuu

SEQ ID NO: 54012 - RNA, 21 nt, RNAi
uuccuuacguggugccgucga

SEQ ID NO: 54013 - DNA, 21 bp, homo sapiens
gaatgcaccacggcagctctc

SEQ ID NO: 54014 - RNA, 21 nt, RNAi
augcaccacggcagcucucuu

SEQ ID NO: 54015 - RNA, 21 nt, RNAi
uuuacguggugccgucgagag

SEQ ID NO: 54016 - DNA, 21 bp, homo sapiens
gatttccacagagactgtttg

SEQ ID NO: 54017 - RNA, 21 nt, RNAi
uuuccacagagacuguuuguu

SEQ ID NO: 54018 - RNA, 21 nt, RNAi
uuaaaggugucucugacaaac

SEQ ID NO: 54019 - DNA, 21 bp, homo sapiens
gagatgtgagccttgtgcatg

SEQ ID NO: 54020 - RNA, 21 nt, RNAi
gaugugagccuugugcauguu

SEQ ID NO: 54021 - RNA, 21 nt, RNAi
uucuacacucggaacacguac

SEQ ID NO: 54022 - DNA, 21 bp, homo sapiens
gatgtgagccttgtgcatgtg

SEQ ID NO: 54023 - RNA, 21 nt, RNAi
ugugagccuugugcauguguu

SEQ ID NO: 54024 - RNA, 21 nt, RNAi
uuacacucggaacacguacac

SEQ ID NO: 54025 - DNA, 21 bp, homo sapiens
gaaacttggatgtcactgcct

SEQ ID NO: 54026 - RNA, 21 nt, RNAi
aacuuggaugucacugccuuu

SEQ ID NO: 54027 - RNA, 21 nt, RNAi
uuuugaaccuacagugacgga

SEQ ID NO: 54028 - DNA, 21 bp, homo sapiens
gatgtcactgcctgacattca

SEQ ID NO: 54029 - RNA, 21 nt, RNAi
ugucacugccugacauucauu

SEQ ID NO: 54030 - RNA, 21 nt, RNAi
uuacagugacggacuguaagu

SEQ ID NO: 54031 - DNA, 21 bp, homo sapiens
gacattcacttccagagagga

SEQ ID NO: 54032 - RNA, 21 nt, RNAi
cauucacuuccagagaggauu

SEQ ID NO: 54033 - RNA, 21 nt, RNAi
uuguaagugaaggucucuccu

SEQ ID NO: 54034 - DNA, 21 bp, homo sapiens
gaattgactgcctatgccaag

SEQ ID NO: 54035 - RNA, 21 nt, RNAi
auugacugccuaugccaaguu

SEQ ID NO: 54036 - RNA, 21 nt, RNAi
uuuaacugacggauacgguuc

SEQ ID NO: 54037 - DNA, 21 bp, homo sapiens
gaatcaagcaatccagcctca

SEQ ID NO: 54038 - RNA, 21 nt, RNAi
aucaagcaauccagccucauu

SEQ ID NO: 54039 - RNA, 21 nt, RNAi
uuuaguucguuaggucggagu

SEQ ID NO: 54040 - DNA, 21 bp, homo sapiens
gagaaatggcatcattataag

SEQ ID NO: 54041 - RNA, 21 nt, RNAi
gaaauggcaucauuauaaguu

SEQ ID NO: 54042 - RNA, 21 nt, RNAi
uucuuuaccguaguaauauuc

SEQ ID NO: 54043 - DNA, 21 bp, homo sapiens
gaaatggcatcattataagct

SEQ ID NO: 54044 - RNA, 21 nt, RNAi
aauggcaucauuauaagcuuu

SEQ ID NO: 54045 - RNA, 21 nt, RNAi
uuuuaccguaguaauauucga

SEQ ID NO: 54046 - DNA, 21 bp, homo sapiens
gagttgaaatgttctgtcaaa

SEQ ID NO: 54047 - RNA, 21 nt, RNAi
guugaaauguucugucaaauu

SEQ ID NO: 54048 - RNA, 21 nt, RNAi
uucaacuuuacaagacaguuu

SEQ ID NO: 54049 - DNA, 21 bp, homo sapiens
gaaatgttctgtcaaatgtgt

SEQ ID NO: 54050 - RNA, 21 nt, RNAi
aauguucugucaaauguguuu

SEQ ID NO: 54051 - RNA, 21 nt, RNAi
uuuuacaagacaguuuacaca

SEQ ID NO: 54052 - DNA, 21 bp, homo sapiens
gaaatggtatgtagagcttag

SEQ ID NO: 54053 - RNA, 21 nt, RNAi
aaugguauguagagcuuaguu

SEQ ID NO: 54054 - RNA, 21 nt, RNAi
uuuuaccauacaucucgaauc

SEQ ID NO: 54055 - DNA, 21 bp, homo sapiens
gacagagccatggtgtgtttg

SEQ ID NO: 54056 - RNA, 21 nt, RNAi
cagagccaugguguguuuguu

SEQ ID NO: 54057 - RNA, 21 nt, RNAi
uugucucgguaccacacaaac

SEQ ID NO: 54058 - DNA, 21 bp, homo sapiens
gagccatggtgtgtttgtaat

SEQ ID NO: 54059 - RNA, 21 nt, RNAi
gccaugguguguuuguaauuu

SEQ ID NO: 54060 - RNA, 21 nt, RNAi
uucgguaccacacaaacauua

SEQ ID NO: 54061 - DNA, 21 bp, homo sapiens
taccagctggtgctgcagcac

SEQ ID NO: 54062 - RNA, 21 nt, RNAi
ccagcuggugcugcagcacuu

SEQ ID NO: 54063 - RNA, 21 nt, RNAi
uuggucgaccacgacgucgug

SEQ ID NO: 54064 - DNA, 21 bp, homo sapiens
tattggcactaataggaagta

SEQ ID NO: 54065 - RNA, 21 nt, RNAi
uuggcacuaauaggaaguauu

SEQ ID NO: 54066 - RNA, 21 nt, RNAi
uuaaccgugauuauccuucau

SEQ ID NO: 54067 - DNA, 21 bp, homo sapiens
taataggaagtacttcaccaa

SEQ ID NO: 54068 - RNA, 21 nt, RNAi
auaggaaguacuucaccaauu

SEQ ID NO: 54069 - RNA, 21 nt, RNAi
uuuauccuucaugaagugguu

SEQ ID NO: 54070 - DNA, 21 bp, homo sapiens
taggaagtacttcaccaactg

SEQ ID NO: 54071 - RNA, 21 nt, RNAi
ggaaguacuucaccaacuguu

SEQ ID NO: 54072 - RNA, 21 nt, RNAi
uuccuucaugaagugguugac

SEQ ID NO: 54073 - DNA, 21 bp, homo sapiens
tacttcaccaactgcaagcag

SEQ ID NO: 54074 - RNA, 21 nt, RNAi
cuucaccaacugcaagcaguu

SEQ ID NO: 54075 - RNA, 21 nt, RNAi
uugaagugguugacguucguc

SEQ ID NO: 54076 - DNA, 21 bp, homo sapiens
tacgagtgctgtcctggatat

SEQ ID NO: 54077 - RNA, 21 nt, RNAi
cgagugcuguccuggauauuu

SEQ ID NO: 54078 - RNA, 21 nt, RNAi
uugcucacgacaggaccuaua

SEQ ID NO: 54079 - DNA, 21 bp, homo sapiens
taccactctcaaacctttacg

SEQ ID NO: 54080 - RNA, 21 nt, RNAi
ccacucucaaaccuuuacguu

SEQ ID NO: 54081 - RNA, 21 nt, RNAi
uuggugagaguuuggaaaugc

SEQ ID NO: 54082 - DNA, 21 bp, homo sapiens
tacacggaccgcacggagaag

SEQ ID NO: 54083 - RNA, 21 nt, RNAi
cacggaccgcacggagaaguu

SEQ ID NO: 54084 - RNA, 21 nt, RNAi
uugugccuggcgugccucuuc

SEQ ID NO: 54085 - DNA, 21 bp, homo sapiens
tatgtaccagaattccaacat

SEQ ID NO: 54086 - RNA, 21 nt, RNAi
uguaccagaauuccaacauuu

SEQ ID NO: 54087 - RNA, 21 nt, RNAi
uuacauggucuuaagguugua

SEQ ID NO: 54088 - DNA, 21 bp, homo sapiens
taccagaattccaacatccag

SEQ ID NO: 54089 - RNA, 21 nt, RNAi
ccagaauuccaacauccaguu

SEQ ID NO: 54090 - RNA, 21 nt, RNAi
uuggucuuaagguuguagguc

SEQ ID NO: 54091 - DNA, 21 bp, homo sapiens
taaggtcatctccaccatcac

SEQ ID NO: 54092 - RNA, 21 nt, RNAi
aggucaucuccaccaucacuu

SEQ ID NO: 54093 - RNA, 21 nt, RNAi
uuuccaguagaggugguagug

SEQ ID NO: 54094 - DNA, 21 bp, homo sapiens
tagtgagactttgaaccgtat

SEQ ID NO: 54095 - RNA, 21 nt, RNAi
gugagacuuugaaccguauuu

SEQ ID NO: 54096 - RNA, 21 nt, RNAi
uucacucugaaacuuggcaua

SEQ ID NO: 54097 - DNA, 21 bp, homo sapiens
tatgtgtgctgaagccatcgt

SEQ ID NO: 54098 - RNA, 21 nt, RNAi
ugugugcugaagccaucguuu

SEQ ID NO: 54099 - RNA, 21 nt, RNAi
uuacacacgacuucgguagca

SEQ ID NO: 54100 - DNA, 21 bp, homo sapiens
taaagacatcctagccaccaa

SEQ ID NO: 54101 - RNA, 21 nt, RNAi
aagacauccuagccaccaauu

SEQ ID NO: 54102 - RNA, 21 nt, RNAi
uuuucuguaggaucggugguu

SEQ ID NO: 54103 - DNA, 21 bp, homo sapiens
tacattgatgagctactcatc

SEQ ID NO: 54104 - RNA, 21 nt, RNAi
cauugaugagcuacucaucuu

SEQ ID NO: 54105 - RNA, 21 nt, RNAi
uuguaacuacucgaugaguag

SEQ ID NO: 54106 - DNA, 21 bp, homo sapiens
tatttgaattggctgcagagt

SEQ ID NO: 54107 - RNA, 21 nt, RNAi
uuugaauuggcugcagaguuu

SEQ ID NO: 54108 - RNA, 21 nt, RNAi
uuaaacuuaaccgacgucuca

SEQ ID NO: 54109 - DNA, 21 bp, homo sapiens
tacaaggaatttgcttcggaa

SEQ ID NO: 54110 - RNA, 21 nt, RNAi
caaggaauuugcuucggaauu

SEQ ID NO: 54111 - RNA, 21 nt, RNAi
uuguuccuuaaacgaagccuu

SEQ ID NO: 54112 - DNA, 21 bp, homo sapiens
taattaaagaccagctggcct

SEQ ID NO: 54113 - RNA, 21 nt, RNAi
auuaaagaccagcuggccuuu

SEQ ID NO: 54114 - RNA, 21 nt, RNAi
uuuaauuucuggucgaccgga

SEQ ID NO: 54115 - DNA, 21 bp, homo sapiens
taaagaccagctggcctctaa

SEQ ID NO: 54116 - RNA, 21 nt, RNAi
aagaccagcuggccucuaauu

SEQ ID NO: 54117 - RNA, 21 nt, RNAi
uuuucuggucgaccggagauu

SEQ ID NO: 54118 - DNA, 21 bp, homo sapiens
taagtatctgtaccatggaca

SEQ ID NO: 54119 - RNA, 21 nt, RNAi
aguaucuguaccauggacauu

SEQ ID NO: 54120 - RNA, 21 nt, RNAi
uuucauagacaugguaccugu

SEQ ID NO: 54121 - DNA, 21 bp, homo sapiens
tatctgtaccatggacagacc

SEQ ID NO: 54122 - RNA, 21 nt, RNAi
ucuguaccauggacagaccuu

SEQ ID NO: 54123 - RNA, 21 nt, RNAi
uuagacaugguaccugucugg

SEQ ID NO: 54124 - DNA, 21 bp, homo sapiens
tatcgtaatagcctttgcatt

SEQ ID NO: 54125 - RNA, 21 nt, RNAi
ucguaauagccuuugcauuuu

SEQ ID NO: 54126 - RNA, 21 nt, RNAi
uuagcauuaucggaaacguaa

SEQ ID NO: 54127 - DNA, 21 bp, homo sapiens
taatagcctttgcattgagaa

SEQ ID NO: 54128 - RNA, 21 nt, RNAi
auagccuuugcauugagaauu

SEQ ID NO: 54129 - RNA, 21 nt, RNAi
uuuaucggaaacguaacucuu

SEQ ID NO: 54130 - DNA, 21 bp, homo sapiens
tagcctttgcattgagaacag

SEQ ID NO: 54131 - RNA, 21 nt, RNAi
gccuuugcauugagaacaguu

SEQ ID NO: 54132 - RNA, 21 nt, RNAi
uucggaaacguaacucuuguc

SEQ ID NO: 54133 - DNA, 21 bp, homo sapiens
tagcatgctggtagctgccat

SEQ ID NO: 54134 - RNA, 21 nt, RNAi
gcaugcugguagcugccauuu

SEQ ID NO: 54135 - RNA, 21 nt, RNAi
uucguacgaccaucgacggua

SEQ ID NO: 54136 - DNA, 21 bp, homo sapiens
tagctgccatccagtctgcag

SEQ ID NO: 54137 - RNA, 21 nt, RNAi
gcugccauccagucugcaguu

SEQ ID NO: 54138 - RNA, 21 nt, RNAi
uucgacgguaggucagacguc

SEQ ID NO: 54139 - DNA, 21 bp, homo sapiens
taccacattggtgatgaaatc

SEQ ID NO: 54140 - RNA, 21 nt, RNAi
ccacauuggugaugaaaucuu

SEQ ID NO: 54141 - RNA, 21 nt, RNAi
uugguguaaccacuacuuuag

SEQ ID NO: 54142 - DNA, 21 bp, homo sapiens
taaagtctctccaaggtgaca

SEQ ID NO: 54143 - RNA, 21 nt, RNAi
aagucucuccaaggugacauu

SEQ ID NO: 54144 - RNA, 21 nt, RNAi
uuuucagagagguuccacugu

SEQ ID NO: 54145 - DNA, 21 bp, homo sapiens
tattagagaggatgaagcatt

SEQ ID NO: 54146 - RNA, 21 nt, RNAi
uuagagaggaugaagcauuuu

SEQ ID NO: 54147 - RNA, 21 nt, RNAi
uuaaucucuccuacuucguaa

SEQ ID NO: 54148 - DNA, 21 bp, homo sapiens
tagagaggatgaagcattagc

SEQ ID NO: 54149 - RNA, 21 nt, RNAi
gagaggaugaagcauuagcuu

SEQ ID NO: 54150 - RNA, 21 nt, RNAi
uucucuccuacuucguaaucg

SEQ ID NO: 54151 - DNA, 21 bp, homo sapiens
tagcttgaagcactacaggag

SEQ ID NO: 54152 - RNA, 21 nt, RNAi
gcuugaagcacuacaggaguu

SEQ ID NO: 54153 - RNA, 21 nt, RNAi
uucgaacuucgugauguccuc

SEQ ID NO: 54154 - DNA, 21 bp, homo sapiens
tacaggaggaatgcaccacgg

SEQ ID NO: 54155 - RNA, 21 nt, RNAi
caggaggaaugcaccacgguu

SEQ ID NO: 54156 - RNA, 21 nt, RNAi
uuguccuccuuacguggugcc

SEQ ID NO: 54157 - DNA, 21 bp, homo sapiens
taatgagatgtgagccttgtg

SEQ ID NO: 54158 - RNA, 21 nt, RNAi
augagaugugagccuuguguu

SEQ ID NO: 54159 - RNA, 21 nt, RNAi
uuuacucuacacucggaacac

SEQ ID NO: 54160 - DNA, 21 bp, homo sapiens
tatgagttgaaatgttctgtc

SEQ ID NO: 54161 - RNA, 21 nt, RNAi
ugaguugaaauguucugucuu

SEQ ID NO: 54162 - RNA, 21 nt, RNAi
uuacucaacuuuacaagacag

SEQ ID NO: 54163 - DNA, 21 bp, homo sapiens
tacacgtggcttggaggcttt

SEQ ID NO: 54164 - RNA, 21 nt, RNAi
cacguggcuuggaggcuuuuu

SEQ ID NO: 54165 - RNA, 21 nt, RNAi
uugugcaccgaaccuccgaaa

SEQ ID NO: 54166 - DNA, 21 bp, homo sapiens
tattgtgacagagccatggtg

SEQ ID NO: 54167 - RNA, 21 nt, RNAi
uugugacagagccaugguguu

SEQ ID NO: 54168 - RNA, 21 nt, RNAi
uuaacacugucucgguaccac

SEQ ID NO: 54169 - DNA, 21 bp, homo sapiens
aaggttattggcactaatagg

SEQ ID NO: 54170 - RNA, 21 nt, RNAi
gguuauuggcacuaauagguu

SEQ ID NO: 54171 - RNA, 21 nt, RNAi
uuccaauaaccgugauuaucc

SEQ ID NO: 54172 - DNA, 21 bp, homo sapiens
aagcagtggtaccaaaggaaa

SEQ ID NO: 54173 - RNA, 21 nt, RNAi
gcagugguaccaaaggaaauu

SEQ ID NO: 54174 - RNA, 21 nt, RNAi
uucgucaccaugguuuccuuu

SEQ ID NO: 54175 - DNA, 21 bp, homo sapiens
aaatcaacagtcatcagctac

SEQ ID NO: 54176 - RNA, 21 nt, RNAi
aucaacagucaucagcuacuu

SEQ ID NO: 54177 - RNA, 21 nt, RNAi
uuuaguugucaguagucgaug

SEQ ID NO: 54178 - DNA, 21 bp, homo sapiens
aatcaacagtcatcagctacg

SEQ ID NO: 54179 - RNA, 21 nt, RNAi
ucaacagucaucagcuacguu

SEQ ID NO: 54180 - RNA, 21 nt, RNAi
uuaguugucaguagucgaugc

SEQ ID NO: 54181 - DNA, 21 bp, homo sapiens
aacagtcatcagctacgagtg

SEQ ID NO: 54182 - RNA, 21 nt, RNAi
cagucaucagcuacgaguguu

SEQ ID NO: 54183 - RNA, 21 nt, RNAi
uugucaguagucgaugcucac

SEQ ID NO: 54184 - DNA, 21 bp, homo sapiens
aatgtcaacattgagctgctc

SEQ ID NO: 54185 - RNA, 21 nt, RNAi
ugucaacauugagcugcucuu

SEQ ID NO: 54186 - RNA, 21 nt, RNAi
uuacaguuguaacucgacgag

SEQ ID NO: 54187 - DNA, 21 bp, homo sapiens
aaccacatcttgaagtcagct

SEQ ID NO: 54188 - RNA, 21 nt, RNAi
ccacaucuugaagucagcuuu

SEQ ID NO: 54189 - RNA, 21 nt, RNAi
uugguguagaacuucagucga

SEQ ID NO: 54190 - DNA, 21 bp, homo sapiens
aaagacatcctagccaccaac

SEQ ID NO: 54191 - RNA, 21 nt, RNAi
agacauccuagccaccaacuu

SEQ ID NO: 54192 - RNA, 21 nt, RNAi
uuucuguaggaucggugguug

SEQ ID NO: 54193 - DNA, 21 bp, homo sapiens
aaggaatttgcttcggaacca

SEQ ID NO: 54194 - RNA, 21 nt, RNAi
ggaauuugcuucggaaccauu

SEQ ID NO: 54195 - RNA, 21 nt, RNAi
uuccuuaaacgaagccuuggu

SEQ ID NO: 54196 - DNA, 21 bp, homo sapiens
aatcgctttagcatgctggta

SEQ ID NO: 54197 - RNA, 21 nt, RNAi
ucgcuuuagcaugcugguauu

SEQ ID NO: 54198 - RNA, 21 nt, RNAi
uuagcgaaaucguacgaccau

SEQ ID NO: 54199 - DNA, 21 bp, homo sapiens
aaggaacttgccaacatcctg

SEQ ID NO: 54200 - RNA, 21 nt, RNAi
ggaacuugccaacauccuguu

SEQ ID NO: 54201 - RNA, 21 nt, RNAi
uuccuugaacgguuguaggac

SEQ ID NO: 54202 - DNA, 21 bp, homo sapiens
aacttgccaacatcctgaaat

SEQ ID NO: 54203 - RNA, 21 nt, RNAi
cuugccaacauccugaaauuu

SEQ ID NO: 54204 - RNA, 21 nt, RNAi
uugaacgguuguaggacuuua

SEQ ID NO: 54205 - DNA, 21 bp, homo sapiens
aaagtctctccaaggtgacaa

SEQ ID NO: 54206 - RNA, 21 nt, RNAi
agucucuccaaggugacaauu

SEQ ID NO: 54207 - RNA, 21 nt, RNAi
uuucagagagguuccacuguu

SEQ ID NO: 54208 - DNA, 21 bp, homo sapiens
aagtctctccaaggtgacaag

SEQ ID NO: 54209 - RNA, 21 nt, RNAi
gucucuccaaggugacaaguu

SEQ ID NO: 54210 - RNA, 21 nt, RNAi
uucagagagguuccacuguuc

SEQ ID NO: 54211 - DNA, 21 bp, homo sapiens
aaatggcgtggtccatgtcat

SEQ ID NO: 54212 - RNA, 21 nt, RNAi
auggcgugguccaugucauuu

SEQ ID NO: 54213 - RNA, 21 nt, RNAi
uuuaccgcaccagguacagua

SEQ ID NO: 54214 - DNA, 21 bp, homo sapiens
caacgtgtgtgctgtgcagaa

SEQ ID NO: 54215 - RNA, 21 nt, RNAi
acgugugugcugugcagaauu

SEQ ID NO: 54216 - RNA, 21 nt, RNAi
uuugcacacacgacacgucuu

SEQ ID NO: 54217 - DNA, 21 bp, homo sapiens
caagcagtggtaccaaaggaa

SEQ ID NO: 54218 - RNA, 21 nt, RNAi
agcagugguaccaaaggaauu

SEQ ID NO: 54219 - RNA, 21 nt, RNAi
uuucgucaccaugguuuccuu

SEQ ID NO: 54220 - DNA, 21 bp, homo sapiens
caaatcaacagtcatcagcta

SEQ ID NO: 54221 - RNA, 21 nt, RNAi
aaucaacagucaucagcuauu

SEQ ID NO: 54222 - RNA, 21 nt, RNAi
uuuuaguugucaguagucgau

SEQ ID NO: 54223 - DNA, 21 bp, homo sapiens
caacagtcatcagctacgagt

SEQ ID NO: 54224 - RNA, 21 nt, RNAi
acagucaucagcuacgaguuu

SEQ ID NO: 54225 - RNA, 21 nt, RNAi
uuugucaguagucgaugcuca

SEQ ID NO: 54226 - DNA, 21 bp, homo sapiens
cagtcatcagctacgagtgct

SEQ ID NO: 54227 - RNA, 21 nt, RNAi
gucaucagcuacgagugcuuu

SEQ ID NO: 54228 - RNA, 21 nt, RNAi
uucaguagucgaugcucacga

SEQ ID NO: 54229 - DNA, 21 bp, homo sapiens
cactctcaaacctttacgaga

SEQ ID NO: 54230 - RNA, 21 nt, RNAi
cucucaaaccuuuacgagauu

SEQ ID NO: 54231 - RNA, 21 nt, RNAi
uugagaguuuggaaaugcucu

SEQ ID NO: 54232 - DNA, 21 bp, homo sapiens
caatgtcaacattgagctgct

SEQ ID NO: 54233 - RNA, 21 nt, RNAi
augucaacauugagcugcuuu

SEQ ID NO: 54234 - RNA, 21 nt, RNAi
uuuacaguuguaacucgacga

SEQ ID NO: 54235 - DNA, 21 bp, homo sapiens
caaggaatttgcttcggaacc

SEQ ID NO: 54236 - RNA, 21 nt, RNAi
aggaauuugcuucggaaccuu

SEQ ID NO: 54237 - RNA, 21 nt, RNAi
uuuccuuaaacgaagccuugg

SEQ ID NO: 54238 - DNA, 21 bp, homo sapiens
cagctggcctctaagtatctg

SEQ ID NO: 54239 - RNA, 21 nt, RNAi
gcuggccucuaaguaucuguu

SEQ ID NO: 54240 - RNA, 21 nt, RNAi
uucgaccggagauucauagac

SEQ ID NO: 54241 - DNA, 21 bp, homo sapiens
caatcgctttagcatgctggt

SEQ ID NO: 54242 - RNA, 21 nt, RNAi
aucgcuuuagcaugcugguuu

SEQ ID NO: 54243 - RNA, 21 nt, RNAi
uuuagcgaaaucguacgacca

SEQ ID NO: 54244 - DNA, 21 bp, homo sapiens
cacaaatgaagccttccgagc

SEQ ID NO: 54245 - RNA, 21 nt, RNAi
caaaugaagccuuccgagcuu

SEQ ID NO: 54246 - RNA, 21 nt, RNAi
uuguuuacuucggaaggcucg

SEQ ID NO: 54247 - DNA, 21 bp, homo sapiens
caaggaacttgccaacatcct

SEQ ID NO: 54248 - RNA, 21 nt, RNAi
aggaacuugccaacauccuuu

SEQ ID NO: 54249 - RNA, 21 nt, RNAi
uuuccuugaacgguuguagga

SEQ ID NO: 54250 - DNA, 21 bp, homo sapiens
cacaaatggcgtggtccatgt

SEQ ID NO: 54251 - RNA, 21 nt, RNAi
caaauggcgugguccauguuu

SEQ ID NO: 54252 - RNA, 21 nt, RNAi
uuguuuaccgcaccagguaca

SEQ ID NO: 54253 - DNA, 21 bp, homo sapiens
caaatggcgtggtccatgtca

SEQ ID NO: 54254 - RNA, 21 nt, RNAi
aauggcgugguccaugucauu

SEQ ID NO: 54255 - RNA, 21 nt, RNAi
uuuuaccgcaccagguacagu

SEQ ID NO: 54256 - DNA, 21 bp, homo sapiens
gaaggttattggcactaatag

SEQ ID NO: 54257 - RNA, 21 nt, RNAi
agguuauuggcacuaauaguu

SEQ ID NO: 54258 - RNA, 21 nt, RNAi
uuuccaauaaccgugauuauc

SEQ ID NO: 54259 - DNA, 21 bp, homo sapiens
gagactttgaaccgtatcctg

SEQ ID NO: 54260 - RNA, 21 nt, RNAi
gacuuugaaccguauccuguu

SEQ ID NO: 54261 - RNA, 21 nt, RNAi
uucugaaacuuggcauaggac

SEQ ID NO: 54262 - DNA, 21 bp, homo sapiens
gagagacctgctgaacaacca

SEQ ID NO: 54263 - RNA, 21 nt, RNAi
gagaccugcugaacaaccauu

SEQ ID NO: 54264 - RNA, 21 nt, RNAi
uucucuggacgacuuguuggu

SEQ ID NO: 54265 - DNA, 21 bp, homo sapiens
gatgtgtccacagccattgac

SEQ ID NO: 54266 - RNA, 21 nt, RNAi
uguguccacagccauugacuu

SEQ ID NO: 54267 - RNA, 21 nt, RNAi
uuacacaggugucgguaacug

SEQ ID NO: 54268 - DNA, 21 bp, homo sapiens
gaatttgcttcggaaccacat

SEQ ID NO: 54269 - RNA, 21 nt, RNAi
auuugcuucggaaccacauuu

SEQ ID NO: 54270 - RNA, 21 nt, RNAi
uuuaaacgaagccuuggugua

SEQ ID NO: 54271 - DNA, 21 bp, homo sapiens
gaccagctggcctctaagtat

SEQ ID NO: 54272 - RNA, 21 nt, RNAi
ccagcuggccucuaaguauuu

SEQ ID NO: 54273 - RNA, 21 nt, RNAi
uuggucgaccggagauucaua

SEQ ID NO: 54274 - DNA, 21 bp, homo sapiens
gagacaatcgctttagcatgc

SEQ ID NO: 54275 - RNA, 21 nt, RNAi
gacaaucgcuuuagcaugcuu

SEQ ID NO: 54276 - RNA, 21 nt, RNAi
uucuguuagcgaaaucguacg

SEQ ID NO: 54277 - DNA, 21 bp, homo sapiens
gacaatcgctttagcatgctg

SEQ ID NO: 54278 - RNA, 21 nt, RNAi
caaucgcuuuagcaugcuguu

SEQ ID NO: 54279 - RNA, 21 nt, RNAi
uuguuagcgaaaucguacgac

SEQ ID NO: 54280 - DNA, 21 bp, homo sapiens
gagtctacacagtcttcgctc

SEQ ID NO: 54281 - RNA, 21 nt, RNAi
gucuacacagucuucgcucuu

SEQ ID NO: 54282 - RNA, 21 nt, RNAi
uucagaugugucagaagcgag

SEQ ID NO: 54283 - DNA, 21 bp, homo sapiens
gagatgccaaggaacttgcca

SEQ ID NO: 54284 - RNA, 21 nt, RNAi
gaugccaaggaacuugccauu

SEQ ID NO: 54285 - RNA, 21 nt, RNAi
uucuacgguuccuugaacggu

SEQ ID NO: 54286 - DNA, 21 bp, homo sapiens
gaacttgccaacatcctgaaa

SEQ ID NO: 54287 - RNA, 21 nt, RNAi
acuugccaacauccugaaauu

SEQ ID NO: 54288 - RNA, 21 nt, RNAi
uuugaacgguuguaggacuuu

SEQ ID NO: 54289 - DNA, 21 bp, homo sapiens
gagatcttcaaacaagcatca

SEQ ID NO: 54290 - RNA, 21 nt, RNAi
gaucuucaaacaagcaucauu

SEQ ID NO: 54291 - RNA, 21 nt, RNAi
uucuagaaguuuguucguagu

SEQ ID NO: 54292 - DNA, 21 bp, homo sapiens
tattggcactaataggaagta

SEQ ID NO: 54293 - RNA, 21 nt, RNAi
uuggcacuaauaggaaguauu

SEQ ID NO: 54294 - RNA, 21 nt, RNAi
uuaaccgugauuauccuucau

SEQ ID NO: 54295 - DNA, 21 bp, homo sapiens
tagtgagactttgaaccgtat

SEQ ID NO: 54296 - RNA, 21 nt, RNAi
gugagacuuugaaccguauuu

SEQ ID NO: 54297 - RNA, 21 nt, RNAi
uucacucugaaacuuggcaua

SEQ ID NO: 54298 - DNA, 21 bp, homo sapiens
taaagacatcctagccaccaa

SEQ ID NO: 54299 - RNA, 21 nt, RNAi
aagacauccuagccaccaauu

SEQ ID NO: 54300 - RNA, 21 nt, RNAi
uuuucuguaggaucggugguu

SEQ ID NO: 54301 - DNA, 21 bp, homo sapiens
taagtatctgtaccatggaca

SEQ ID NO: 54302 - RNA, 21 nt, RNAi
aguaucuguaccauggacauu

SEQ ID NO: 54303 - RNA, 21 nt, RNAi
uuucauagacaugguaccugu

SEQ ID NO: 54304 - DNA, 21 bp, homo sapiens
taaagtctctccaaggtgaca

SEQ ID NO: 54305 - RNA, 21 nt, RNAi
aagucucuccaaggugacauu

SEQ ID NO: 54306 - RNA, 21 nt, RNAi
uuuucagagagguuccacugu

SEQ ID NO: 54307 - DNA, 21 bp, homo sapiens
aaccaccggcaggaaacttcg

SEQ ID NO: 54308 - RNA, 21 nt, RNAi
ccaccggcaggaaacuucguu

SEQ ID NO: 54309 - RNA, 21 nt, RNAi
uugguggccguccuuugaagc

SEQ ID NO: 54310 - DNA, 21 bp, homo sapiens
aaacttcgagaggaggagagg

SEQ ID NO: 54311 - RNA, 21 nt, RNAi
acuucgagaggaggagagguu

SEQ ID NO: 54312 - RNA, 21 nt, RNAi
uuugaagcucuccuccucucc

SEQ ID NO: 54313 - DNA, 21 bp, homo sapiens
aacttcgagaggaggagaggc

SEQ ID NO: 54314 - RNA, 21 nt, RNAi
cuucgagaggaggagaggcuu

SEQ ID NO: 54315 - RNA, 21 nt, RNAi
uugaagcucuccuccucuccg

SEQ ID NO: 54316 - DNA, 21 bp, homo sapiens
aaaggtgtacagtgaggatgg

SEQ ID NO: 54317 - RNA, 21 nt, RNAi
agguguacagugaggaugguu

SEQ ID NO: 54318 - RNA, 21 nt, RNAi
uuuccacaugucacuccuacc

SEQ ID NO: 54319 - DNA, 21 bp, homo sapiens
aaatgctggtgcagcgagctc

SEQ ID NO: 54320 - RNA, 21 nt, RNAi
augcuggugcagcgagcucuu

SEQ ID NO: 54321 - RNA, 21 nt, RNAi
uuuacgaccacgucgcucgag

SEQ ID NO: 54322 - DNA, 21 bp, homo sapiens
aatgctggtgcagcgagctca

SEQ ID NO: 54323 - RNA, 21 nt, RNAi
ugcuggugcagcgagcucauu

SEQ ID NO: 54324 - RNA, 21 nt, RNAi
uuacgaccacgucgcucgagu

SEQ ID NO: 54325 - DNA, 21 bp, homo sapiens
aaacttcgccaagtacgaact

SEQ ID NO: 54326 - RNA, 21 nt, RNAi
acuucgccaaguacgaacuuu

SEQ ID NO: 54327 - RNA, 21 nt, RNAi
uuugaagcgguucaugcuuga

SEQ ID NO: 54328 - DNA, 21 bp, homo sapiens
aacttcgccaagtacgaactg

SEQ ID NO: 54329 - RNA, 21 nt, RNAi
cuucgccaaguacgaacuguu

SEQ ID NO: 54330 - RNA, 21 nt, RNAi
uugaagcgguucaugcuugac

SEQ ID NO: 54331 - DNA, 21 bp, homo sapiens
aagtacgaactgttcaagagc

SEQ ID NO: 54332 - RNA, 21 nt, RNAi
guacgaacuguucaagagcuu

SEQ ID NO: 54333 - RNA, 21 nt, RNAi
uucaugcuugacaaguucucg

SEQ ID NO: 54334 - DNA, 21 bp, homo sapiens
aaatggtctccagctgtctcg

SEQ ID NO: 54335 - RNA, 21 nt, RNAi
auggucuccagcugucucguu

SEQ ID NO: 54336 - RNA, 21 nt, RNAi
uuuaccagaggucgacagagc

SEQ ID NO: 54337 - DNA, 21 bp, homo sapiens
aatggtctccagctgtctcga

SEQ ID NO: 54338 - RNA, 21 nt, RNAi
uggucuccagcugucucgauu

SEQ ID NO: 54339 - RNA, 21 nt, RNAi
uuaccagaggucgacagagcu

SEQ ID NO: 54340 - DNA, 21 bp, homo sapiens
aagacctcatccagaacttcc

SEQ ID NO: 54341 - RNA, 21 nt, RNAi
gaccucauccagaacuuccuu

SEQ ID NO: 54342 - RNA, 21 nt, RNAi
uucuggaguaggucuugaagg

SEQ ID NO: 54343 - DNA, 21 bp, homo sapiens
aacttcctgaatgctggcagc

SEQ ID NO: 54344 - RNA, 21 nt, RNAi
cuuccugaaugcuggcagcuu

SEQ ID NO: 54345 - RNA, 21 nt, RNAi
uugaaggacuuacgaccgucg

SEQ ID NO: 54346 - DNA, 21 bp, homo sapiens
aatgctggcagctttcctgag

SEQ ID NO: 54347 - RNA, 21 nt, RNAi
ugcuggcagcuuuccugaguu

SEQ ID NO: 54348 - RNA, 21 nt, RNAi
uuacgaccgucgaaaggacuc

SEQ ID NO: 54349 - DNA, 21 bp, homo sapiens
aaggatccgaggcacctgcag

SEQ ID NO: 54350 - RNA, 21 nt, RNAi
ggauccgaggcaccugcaguu

SEQ ID NO: 54351 - RNA, 21 nt, RNAi
uuccuaggcuccguggacguc

SEQ ID NO: 54352 - DNA, 21 bp, homo sapiens
aacgagtccaacgtgtacgtg

SEQ ID NO: 54353 - RNA, 21 nt, RNAi
cgaguccaacguguacguguu

SEQ ID NO: 54354 - RNA, 21 nt, RNAi
uugcucagguugcacaugcac

SEQ ID NO: 54355 - DNA, 21 bp, homo sapiens
aacgtgtacgtggtgacgcag

SEQ ID NO: 54356 - RNA, 21 nt, RNAi
cguguacguggugacgcaguu

SEQ ID NO: 54357 - RNA, 21 nt, RNAi
uugcacaugcaccacugcguc

SEQ ID NO: 54358 - DNA, 21 bp, homo sapiens
aacaagcttcgaaatggacac

SEQ ID NO: 54359 - RNA, 21 nt, RNAi
caagcuucgaaauggacacuu

SEQ ID NO: 54360 - RNA, 21 nt, RNAi
uuguucgaagcuuuaccugug

SEQ ID NO: 54361 - DNA, 21 bp, homo sapiens
aagcttcgaaatggacacaag

SEQ ID NO: 54362 - RNA, 21 nt, RNAi
gcuucgaaauggacacaaguu

SEQ ID NO: 54363 - RNA, 21 nt, RNAi
uucgaagcuuuaccuguguuc

SEQ ID NO: 54364 - DNA, 21 bp, homo sapiens
aagatgagcagagccgcacct

SEQ ID NO: 54365 - RNA, 21 nt, RNAi
gaugagcagagccgcaccuuu

SEQ ID NO: 54366 - RNA, 21 nt, RNAi
uucuacucgucucggcgugga

SEQ ID NO: 54367 - DNA, 21 bp, homo sapiens
aagaattaccagcaggcacag

SEQ ID NO: 54368 - RNA, 21 nt, RNAi
gaauuaccagcaggcacaguu

SEQ ID NO: 54369 - RNA, 21 nt, RNAi
uucuuaauggucguccguguc

SEQ ID NO: 54370 - DNA, 21 bp, homo sapiens
aattaccagcaggcacagtct

SEQ ID NO: 54371 - RNA, 21 nt, RNAi
uuaccagcaggcacagucuuu

SEQ ID NO: 54372 - RNA, 21 nt, RNAi
uuaauggucguccgugucaga

SEQ ID NO: 54373 - DNA, 21 bp, homo sapiens
aagaagacaaaccaccgcctc

SEQ ID NO: 54374 - RNA, 21 nt, RNAi
gaagacaaaccaccgccucuu

SEQ ID NO: 54375 - RNA, 21 nt, RNAi
uucuucuguuugguggcggag

SEQ ID NO: 54376 - DNA, 21 bp, homo sapiens
aagacaaaccaccgcctcagc

SEQ ID NO: 54377 - RNA, 21 nt, RNAi
gacaaaccaccgccucagcuu

SEQ ID NO: 54378 - RNA, 21 nt, RNAi
uucuguuugguggcggagucg

SEQ ID NO: 54379 - DNA, 21 bp, homo sapiens
aaagtgaagcattatctcatc

SEQ ID NO: 54380 - RNA, 21 nt, RNAi
agugaagcauuaucucaucuu

SEQ ID NO: 54381 - RNA, 21 nt, RNAi
uuucacuucguaauagaguag

SEQ ID NO: 54382 - DNA, 21 bp, homo sapiens
aagtgaagcattatctcatcc

SEQ ID NO: 54383 - RNA, 21 nt, RNAi
gugaagcauuaucucauccuu

SEQ ID NO: 54384 - RNA, 21 nt, RNAi
uucacuucguaauagaguagg

SEQ ID NO: 54385 - DNA, 21 bp, homo sapiens
aagcattatctcatcctgccg

SEQ ID NO: 54386 - RNA, 21 nt, RNAi
gcauuaucucauccugccguu

SEQ ID NO: 54387 - RNA, 21 nt, RNAi
uucguaauagaguaggacggc

SEQ ID NO: 54388 - DNA, 21 bp, homo sapiens
cacacaactggttccgttaag

SEQ ID NO: 54389 - RNA, 21 nt, RNAi
cacaacugguuccguuaaguu

SEQ ID NO: 54390 - RNA, 21 nt, RNAi
uuguguugaccaaggcaauuc

SEQ ID NO: 54391 - DNA, 21 bp, homo sapiens
cacaactggttccgttaagcc

SEQ ID NO: 54392 - RNA, 21 nt, RNAi
caacugguuccguuaagccuu

SEQ ID NO: 54393 - RNA, 21 nt, RNAi
uuguugaccaaggcaauucgg

SEQ ID NO: 54394 - DNA, 21 bp, homo sapiens
cagacgccatggagctggatc

SEQ ID NO: 54395 - RNA, 21 nt, RNAi
gacgccauggagcuggaucuu

SEQ ID NO: 54396 - RNA, 21 nt, RNAi
uucugcgguaccucgaccuag

SEQ ID NO: 54397 - DNA, 21 bp, homo sapiens
catggagctggatctgtctcc

SEQ ID NO: 54398 - RNA, 21 nt, RNAi
uggagcuggaucugucuccuu

SEQ ID NO: 54399 - RNA, 21 nt, RNAi
uuaccucgaccuagacagagg

SEQ ID NO: 54400 - DNA, 21 bp, homo sapiens
cacctcatcttagcagctctc

SEQ ID NO: 54401 - RNA, 21 nt, RNAi
ccucaucuuagcagcucucuu

SEQ ID NO: 54402 - RNA, 21 nt, RNAi
uuggaguagaaucgucgagag

SEQ ID NO: 54403 - DNA, 21 bp, homo sapiens
catcttagcagctctccggaa

SEQ ID NO: 54404 - RNA, 21 nt, RNAi
ucuuagcagcucuccggaauu

SEQ ID NO: 54405 - RNA, 21 nt, RNAi
uuagaaucgucgagaggccuu

SEQ ID NO: 54406 - DNA, 21 bp, homo sapiens
cagctctccggaagacctttg

SEQ ID NO: 54407 - RNA, 21 nt, RNAi
gcucuccggaagaccuuuguu

SEQ ID NO: 54408 - RNA, 21 nt, RNAi
uucgagaggccuucuggaaac

SEQ ID NO: 54409 - DNA, 21 bp, homo sapiens
caaccaccggcaggaaacttc

SEQ ID NO: 54410 - RNA, 21 nt, RNAi
accaccggcaggaaacuucuu

SEQ ID NO: 54411 - RNA, 21 nt, RNAi
uuugguggccguccuuugaag

SEQ ID NO: 54412 - DNA, 21 bp, homo sapiens
caccggcaggaaacttcgaga

SEQ ID NO: 54413 - RNA, 21 nt, RNAi
ccggcaggaaacuucgagauu

SEQ ID NO: 54414 - RNA, 21 nt, RNAi
uuggccguccuuugaagcucu

SEQ ID NO: 54415 - DNA, 21 bp, homo sapiens
caggaaacttcgagaggagga

SEQ ID NO: 54416 - RNA, 21 nt, RNAi
ggaaacuucgagaggaggauu

SEQ ID NO: 54417 - RNA, 21 nt, RNAi
uuccuuugaagcucuccuccu

SEQ ID NO: 54418 - DNA, 21 bp, homo sapiens
catgtagtaaaggtgtacagt

SEQ ID NO: 54419 - RNA, 21 nt, RNAi
uguaguaaagguguacaguuu

SEQ ID NO: 54420 - RNA, 21 nt, RNAi
uuacaucauuuccacauguca

SEQ ID NO: 54421 - DNA, 21 bp, homo sapiens
cacagctcgccacgtgtgtga

SEQ ID NO: 54422 - RNA, 21 nt, RNAi
cagcucgccacgugugugauu

SEQ ID NO: 54423 - RNA, 21 nt, RNAi
uugucgagcggugcacacacu

SEQ ID NO: 54424 - DNA, 21 bp, homo sapiens
cagctcgccacgtgtgtgaaa

SEQ ID NO: 54425 - RNA, 21 nt, RNAi
gcucgccacgugugugaaauu

SEQ ID NO: 54426 - RNA, 21 nt, RNAi
uucgagcggugcacacacuuu

SEQ ID NO: 54427 - DNA, 21 bp, homo sapiens
cacgtgtgtgaaatgctggtg

SEQ ID NO: 54428 - RNA, 21 nt, RNAi
cgugugugaaaugcugguguu

SEQ ID NO: 54429 - RNA, 21 nt, RNAi
uugcacacacuuuacgaccac

SEQ ID NO: 54430 - DNA, 21 bp, homo sapiens
cacgagtccgtggtggaagtg

SEQ ID NO: 54431 - RNA, 21 nt, RNAi
cgaguccgugguggaaguguu

SEQ ID NO: 54432 - RNA, 21 nt, RNAi
uugcucaggcaccaccuucac

SEQ ID NO: 54433 - DNA, 21 bp, homo sapiens
caagtacgaactgttcaagag

SEQ ID NO: 54434 - RNA, 21 nt, RNAi
aguacgaacuguucaagaguu

SEQ ID NO: 54435 - RNA, 21 nt, RNAi
uuucaugcuugacaaguucuc

SEQ ID NO: 54436 - DNA, 21 bp, homo sapiens
cagctgtctcgatgcacacac

SEQ ID NO: 54437 - RNA, 21 nt, RNAi
gcugucucgaugcacacacuu

SEQ ID NO: 54438 - RNA, 21 nt, RNAi
uucgacagagcuacgugugug

SEQ ID NO: 54439 - DNA, 21 bp, homo sapiens
catgaagacctcatccagaac

SEQ ID NO: 54440 - RNA, 21 nt, RNAi
ugaagaccucauccagaacuu

SEQ ID NO: 54441 - RNA, 21 nt, RNAi
uuacuucuggaguaggucuug

SEQ ID NO: 54442 - DNA, 21 bp, homo sapiens
catccagaacttcctgaatgc

SEQ ID NO: 54443 - RNA, 21 nt, RNAi
uccagaacuuccugaaugcuu

SEQ ID NO: 54444 - RNA, 21 nt, RNAi
uuaggucuugaaggacuuacg

SEQ ID NO: 54445 - DNA, 21 bp, homo sapiens
cagaacttcctgaatgctggc

SEQ ID NO: 54446 - RNA, 21 nt, RNAi
gaacuuccugaaugcuggcuu

SEQ ID NO: 54447 - RNA, 21 nt, RNAi
uucuugaaggacuuacgaccg

SEQ ID NO: 54448 - DNA, 21 bp, homo sapiens
caggacggaagctttggaaac

SEQ ID NO: 54449 - RNA, 21 nt, RNAi
ggacggaagcuuuggaaacuu

SEQ ID NO: 54450 - RNA, 21 nt, RNAi
uuccugccuucgaaaccuuug

SEQ ID NO: 54451 - DNA, 21 bp, homo sapiens
cacctctaaggatccgaggca

SEQ ID NO: 54452 - RNA, 21 nt, RNAi
ccucuaaggauccgaggcauu

SEQ ID NO: 54453 - RNA, 21 nt, RNAi
uuggagauuccuaggcuccgu

SEQ ID NO: 54454 - DNA, 21 bp, homo sapiens
cacctgcagtacgtggcagat

SEQ ID NO: 54455 - RNA, 21 nt, RNAi
ccugcaguacguggcagauuu

SEQ ID NO: 54456 - RNA, 21 nt, RNAi
uuggacgucaugcaccgucua

SEQ ID NO: 54457 - DNA, 21 bp, homo sapiens
cagtacgtggcagatgtgaac

SEQ ID NO: 54458 - RNA, 21 nt, RNAi
guacguggcagaugugaacuu

SEQ ID NO: 54459 - RNA, 21 nt, RNAi
uucaugcaccgucuacacuug

SEQ ID NO: 54460 - DNA, 21 bp, homo sapiens
cagatgtgaacgagtccaacg

SEQ ID NO: 54461 - RNA, 21 nt, RNAi
gaugugaacgaguccaacguu

SEQ ID NO: 54462 - RNA, 21 nt, RNAi
uucuacacuugcucagguugc

SEQ ID NO: 54463 - DNA, 21 bp, homo sapiens
caacgtgtacgtggtgacgca

SEQ ID NO: 54464 - RNA, 21 nt, RNAi
acguguacguggugacgcauu

SEQ ID NO: 54465 - RNA, 21 nt, RNAi
uuugcacaugcaccacugcgu

SEQ ID NO: 54466 - DNA, 21 bp, homo sapiens
cactgacttcggtttctgtgt

SEQ ID NO: 54467 - RNA, 21 nt, RNAi
cugacuucgguuucuguguuu

SEQ ID NO: 54468 - RNA, 21 nt, RNAi
uugacugaagccaaagacaca

SEQ ID NO: 54469 - DNA, 21 bp, homo sapiens
caacaagcttcgaaatggaca

SEQ ID NO: 54470 - RNA, 21 nt, RNAi
acaagcuucgaaauggacauu

SEQ ID NO: 54471 - RNA, 21 nt, RNAi
uuuguucgaagcuuuaccugu

SEQ ID NO: 54472 - DNA, 21 bp, homo sapiens
caagcttcgaaatggacacaa

SEQ ID NO: 54473 - RNA, 21 nt, RNAi
agcuucgaaauggacacaauu

SEQ ID NO: 54474 - RNA, 21 nt, RNAi
uuucgaagcuuuaccuguguu

SEQ ID NO: 54475 - DNA, 21 bp, homo sapiens
cagtgaagatgagcagagccg

SEQ ID NO: 54476 - RNA, 21 nt, RNAi
gugaagaugagcagagccguu

SEQ ID NO: 54477 - RNA, 21 nt, RNAi
uucacuucuacucgucucggc

SEQ ID NO: 54478 - DNA, 21 bp, homo sapiens
cagctgtacaagaattaccag

SEQ ID NO: 54479 - RNA, 21 nt, RNAi
gcuguacaagaauuaccaguu

SEQ ID NO: 54480 - RNA, 21 nt, RNAi
uucgacauguucuuaaugguc

SEQ ID NO: 54481 - DNA, 21 bp, homo sapiens
caagaattaccagcaggcaca

SEQ ID NO: 54482 - RNA, 21 nt, RNAi
agaauuaccagcaggcacauu

SEQ ID NO: 54483 - RNA, 21 nt, RNAi
uuucuuaauggucguccgugu

SEQ ID NO: 54484 - DNA, 21 bp, homo sapiens
cagcaggcacagtctcgccat

SEQ ID NO: 54485 - RNA, 21 nt, RNAi
gcaggcacagucucgccauuu

SEQ ID NO: 54486 - RNA, 21 nt, RNAi
uucguccgugucagagcggua

SEQ ID NO: 54487 - DNA, 21 bp, homo sapiens
caggcacagtctcgccatctg

SEQ ID NO: 54488 - RNA, 21 nt, RNAi
ggcacagucucgccaucuguu

SEQ ID NO: 54489 - RNA, 21 nt, RNAi
uuccgugucagagcgguagac

SEQ ID NO: 54490 - DNA, 21 bp, homo sapiens
cacagtctcgccatctgcatc

SEQ ID NO: 54491 - RNA, 21 nt, RNAi
cagucucgccaucugcaucuu

SEQ ID NO: 54492 - RNA, 21 nt, RNAi
uugucagagcgguagacguag

SEQ ID NO: 54493 - DNA, 21 bp, homo sapiens
cagtctcgccatctgcatcca

SEQ ID NO: 54494 - RNA, 21 nt, RNAi
gucucgccaucugcauccauu

SEQ ID NO: 54495 - RNA, 21 nt, RNAi
uucagagcgguagacguaggu

SEQ ID NO: 54496 - DNA, 21 bp, homo sapiens
catctgcatccatcttgtttg

SEQ ID NO: 54497 - RNA, 21 nt, RNAi
ucugcauccaucuuguuuguu

SEQ ID NO: 54498 - RNA, 21 nt, RNAi
uuagacguagguagaacaaac

SEQ ID NO: 54499 - DNA, 21 bp, homo sapiens
catggacttctctggccatgc

SEQ ID NO: 54500 - RNA, 21 nt, RNAi
uggacuucucuggccaugcuu

SEQ ID NO: 54501 - RNA, 21 nt, RNAi
uuaccugaagagaccgguacg

SEQ ID NO: 54502 - DNA, 21 bp, homo sapiens
caggcctggaggaagaagaca

SEQ ID NO: 54503 - RNA, 21 nt, RNAi
ggccuggaggaagaagacauu

SEQ ID NO: 54504 - RNA, 21 nt, RNAi
uuccggaccuccuucuucugu

SEQ ID NO: 54505 - DNA, 21 bp, homo sapiens
cacgagcctcagtgcagccat

SEQ ID NO: 54506 - RNA, 21 nt, RNAi
cgagccucagugcagccauuu

SEQ ID NO: 54507 - RNA, 21 nt, RNAi
uugcucggagucacgucggua

SEQ ID NO: 54508 - DNA, 21 bp, homo sapiens
cagcggcttattggacagcag

SEQ ID NO: 54509 - RNA, 21 nt, RNAi
gcggcuuauuggacagcaguu

SEQ ID NO: 54510 - RNA, 21 nt, RNAi
uucgccgaauaaccugucguc

SEQ ID NO: 54511 - DNA, 21 bp, homo sapiens
cacctgcagaaagtgaagcat

SEQ ID NO: 54512 - RNA, 21 nt, RNAi
ccugcagaaagugaagcauuu

SEQ ID NO: 54513 - RNA, 21 nt, RNAi
uuggacgucuuucacuucgua

SEQ ID NO: 54514 - DNA, 21 bp, homo sapiens
cagaaagtgaagcattatctc

SEQ ID NO: 54515 - RNA, 21 nt, RNAi
gaaagugaagcauuaucucuu

SEQ ID NO: 54516 - RNA, 21 nt, RNAi
uucuuucacuucguaauagag

SEQ ID NO: 54517 - DNA, 21 bp, homo sapiens
cattatctcatcctgccgagc

SEQ ID NO: 54518 - RNA, 21 nt, RNAi
uuaucucauccugccgagcuu

SEQ ID NO: 54519 - RNA, 21 nt, RNAi
uuaauagaguaggacggcucg

SEQ ID NO: 54520 - DNA, 21 bp, homo sapiens
cagcatggatgatggccagac

SEQ ID NO: 54521 - RNA, 21 nt, RNAi
gcauggaugauggccagacuu

SEQ ID NO: 54522 - RNA, 21 nt, RNAi
uucguaccuacuaccggucug

SEQ ID NO: 54523 - DNA, 21 bp, homo sapiens
cactgacctgctgcagctcgt

SEQ ID NO: 54524 - RNA, 21 nt, RNAi
cugaccugcugcagcucguuu

SEQ ID NO: 54525 - RNA, 21 nt, RNAi
uugacuggacgacgucgagca

SEQ ID NO: 54526 - DNA, 21 bp, homo sapiens
cagctcgtggagttccaccag

SEQ ID NO: 54527 - RNA, 21 nt, RNAi
gcucguggaguuccaccaguu

SEQ ID NO: 54528 - RNA, 21 nt, RNAi
uucgagcaccucaaggugguc

SEQ ID NO: 54529 - DNA, 21 bp, homo sapiens
cactccagtccactcctgacc

SEQ ID NO: 54530 - RNA, 21 nt, RNAi
cuccaguccacuccugaccuu

SEQ ID NO: 54531 - RNA, 21 nt, RNAi
uugaggucaggugaggacugg

SEQ ID NO: 54532 - DNA, 21 bp, homo sapiens
cacactttgtacagaccgaga

SEQ ID NO: 54533 - RNA, 21 nt, RNAi
cacuuuguacagaccgagauu

SEQ ID NO: 54534 - RNA, 21 nt, RNAi
uugugaaacaugucuggcucu

SEQ ID NO: 54535 - DNA, 21 bp, homo sapiens
cactttgtacagaccgagagg

SEQ ID NO: 54536 - RNA, 21 nt, RNAi
cuuuguacagaccgagagguu

SEQ ID NO: 54537 - RNA, 21 nt, RNAi
uugaaacaugucuggcucucc

SEQ ID NO: 54538 - DNA, 21 bp, homo sapiens
cagaccgagaggccagttgat

SEQ ID NO: 54539 - RNA, 21 nt, RNAi
gaccgagaggccaguugauuu

SEQ ID NO: 54540 - RNA, 21 nt, RNAi
uucuggcucuccggucaacua

SEQ ID NO: 54541 - DNA, 21 bp, homo sapiens
gacttctctgtccgaagtcgg

SEQ ID NO: 54542 - RNA, 21 nt, RNAi
cuucucuguccgaagucgguu

SEQ ID NO: 54543 - RNA, 21 nt, RNAi
uugaagagacaggcuucagcc

SEQ ID NO: 54544 - DNA, 21 bp, homo sapiens
gacggagccagacttcggaac

SEQ ID NO: 54545 - RNA, 21 nt, RNAi
cggagccagacuucggaacuu

SEQ ID NO: 54546 - RNA, 21 nt, RNAi
uugccucggucugaagccuug

SEQ ID NO: 54547 - DNA, 21 bp, homo sapiens
gacgccatggagctggatctg

SEQ ID NO: 54548 - RNA, 21 nt, RNAi
cgccauggagcuggaucuguu

SEQ ID NO: 54549 - RNA, 21 nt, RNAi
uugcgguaccucgaccuagac

SEQ ID NO: 54550 - DNA, 21 bp, homo sapiens
gagctggatctgtctccacct

SEQ ID NO: 54551 - RNA, 21 nt, RNAi
gcuggaucugucuccaccuuu

SEQ ID NO: 54552 - RNA, 21 nt, RNAi
uucgaccuagacagaggugga

SEQ ID NO: 54553 - DNA, 21 bp, homo sapiens
gatctgtctccacctcatctt

SEQ ID NO: 54554 - RNA, 21 nt, RNAi
ucugucuccaccucaucuuuu

SEQ ID NO: 54555 - RNA, 21 nt, RNAi
uuagacagagguggaguagaa

SEQ ID NO: 54556 - DNA, 21 bp, homo sapiens
gaaacttcgagaggaggagag

SEQ ID NO: 54557 - RNA, 21 nt, RNAi
aacuucgagaggaggagaguu

SEQ ID NO: 54558 - RNA, 21 nt, RNAi
uuuugaagcucuccuccucuc

SEQ ID NO: 54559 - DNA, 21 bp, homo sapiens
gaaatgctggtgcagcgagct

SEQ ID NO: 54560 - RNA, 21 nt, RNAi
aaugcuggugcagcgagcuuu

SEQ ID NO: 54561 - RNA, 21 nt, RNAi
uuuuacgaccacgucgcucga

SEQ ID NO: 54562 - DNA, 21 bp, homo sapiens
gaccacgagtccgtggtggaa

SEQ ID NO: 54563 - RNA, 21 nt, RNAi
ccacgaguccgugguggaauu

SEQ ID NO: 54564 - RNA, 21 nt, RNAi
uuggugcucaggcaccaccuu

SEQ ID NO: 54565 - DNA, 21 bp, homo sapiens
gagtccgtggtggaagtgcag

SEQ ID NO: 54566 - RNA, 21 nt, RNAi
guccgugguggaagugcaguu

SEQ ID NO: 54567 - RNA, 21 nt, RNAi
uucaggcaccaccuucacguc

SEQ ID NO: 54568 - DNA, 21 bp, homo sapiens
gagatagccgcttcgtcttcc

SEQ ID NO: 54569 - RNA, 21 nt, RNAi
gauagccgcuucgucuuccuu

SEQ ID NO: 54570 - RNA, 21 nt, RNAi
uucuaucggcgaagcagaagg

SEQ ID NO: 54571 - DNA, 21 bp, homo sapiens
gatagccgcttcgtcttccgg

SEQ ID NO: 54572 - RNA, 21 nt, RNAi
uagccgcuucgucuuccgguu

SEQ ID NO: 54573 - RNA, 21 nt, RNAi
uuaucggcgaagcagaaggcc

SEQ ID NO: 54574 - DNA, 21 bp, homo sapiens
gatgcacacactggtatatcc

SEQ ID NO: 54575 - RNA, 21 nt, RNAi
ugcacacacugguauauccuu

SEQ ID NO: 54576 - RNA, 21 nt, RNAi
uuacgugugugaccauauagg

SEQ ID NO: 54577 - DNA, 21 bp, homo sapiens
gaagacctcatccagaacttc

SEQ ID NO: 54578 - RNA, 21 nt, RNAi
agaccucauccagaacuucuu

SEQ ID NO: 54579 - RNA, 21 nt, RNAi
uuucuggaguaggucuugaag

SEQ ID NO: 54580 - DNA, 21 bp, homo sapiens
gacctcatccagaacttcctg

SEQ ID NO: 54581 - RNA, 21 nt, RNAi
ccucauccagaacuuccuguu

SEQ ID NO: 54582 - RNA, 21 nt, RNAi
uuggaguaggucuugaaggac

SEQ ID NO: 54583 - DNA, 21 bp, homo sapiens
gaacttcctgaatgctggcag

SEQ ID NO: 54584 - RNA, 21 nt, RNAi
acuuccugaaugcuggcaguu

SEQ ID NO: 54585 - RNA, 21 nt, RNAi
uuugaaggacuuacgaccguc

SEQ ID NO: 54586 - DNA, 21 bp, homo sapiens
gaatgctggcagctttcctga

SEQ ID NO: 54587 - RNA, 21 nt, RNAi
augcuggcagcuuuccugauu

SEQ ID NO: 54588 - RNA, 21 nt, RNAi
uuuacgaccgucgaaaggacu

SEQ ID NO: 54589 - DNA, 21 bp, homo sapiens
gacggaagctttggaaacgct

SEQ ID NO: 54590 - RNA, 21 nt, RNAi
cggaagcuuuggaaacgcuuu

SEQ ID NO: 54591 - RNA, 21 nt, RNAi
uugccuucgaaaccuuugcga

SEQ ID NO: 54592 - DNA, 21 bp, homo sapiens
gatctggcctctattactcca

SEQ ID NO: 54593 - RNA, 21 nt, RNAi
ucuggccucuauuacuccauu

SEQ ID NO: 54594 - RNA, 21 nt, RNAi
uuagaccggagauaaugaggu

SEQ ID NO: 54595 - DNA, 21 bp, homo sapiens
gatccgaggcacctgcagtac

SEQ ID NO: 54596 - RNA, 21 nt, RNAi
uccgaggcaccugcaguacuu

SEQ ID NO: 54597 - RNA, 21 nt, RNAi
uuaggcuccguggacgucaug

SEQ ID NO: 54598 - DNA, 21 bp, homo sapiens
gatgtgaacgagtccaacgtg

SEQ ID NO: 54599 - RNA, 21 nt, RNAi
ugugaacgaguccaacguguu

SEQ ID NO: 54600 - RNA, 21 nt, RNAi
uuacacuugcucagguugcac

SEQ ID NO: 54601 - DNA, 21 bp, homo sapiens
gaacgagtccaacgtgtacgt

SEQ ID NO: 54602 - RNA, 21 nt, RNAi
acgaguccaacguguacguuu

SEQ ID NO: 54603 - RNA, 21 nt, RNAi
uuugcucagguugcacaugca

SEQ ID NO: 54604 - DNA, 21 bp, homo sapiens
gagtccaacgtgtacgtggtg

SEQ ID NO: 54605 - RNA, 21 nt, RNAi
guccaacguguacgugguguu

SEQ ID NO: 54606 - RNA, 21 nt, RNAi
uucagguugcacaugcaccac

SEQ ID NO: 54607 - DNA, 21 bp, homo sapiens
gacttcggtttctgtgtcaag

SEQ ID NO: 54608 - RNA, 21 nt, RNAi
cuucgguuucugugucaaguu

SEQ ID NO: 54609 - RNA, 21 nt, RNAi
uugaagccaaagacacaguuc

SEQ ID NO: 54610 - DNA, 21 bp, homo sapiens
gatcttctgcagtgaagatga

SEQ ID NO: 54611 - RNA, 21 nt, RNAi
ucuucugcagugaagaugauu

SEQ ID NO: 54612 - RNA, 21 nt, RNAi
uuagaagacgucacuucuacu

SEQ ID NO: 54613 - DNA, 21 bp, homo sapiens
gaagatgagcagagccgcacc

SEQ ID NO: 54614 - RNA, 21 nt, RNAi
agaugagcagagccgcaccuu

SEQ ID NO: 54615 - RNA, 21 nt, RNAi
uuucuacucgucucggcgugg

SEQ ID NO: 54616 - DNA, 21 bp, homo sapiens
gaattaccagcaggcacagtc

SEQ ID NO: 54617 - RNA, 21 nt, RNAi
auuaccagcaggcacagucuu

SEQ ID NO: 54618 - RNA, 21 nt, RNAi
uuuaauggucguccgugucag

SEQ ID NO: 54619 - DNA, 21 bp, homo sapiens
gagaagtgcctcagataatac

SEQ ID NO: 54620 - RNA, 21 nt, RNAi
gaagugccucagauaauacuu

SEQ ID NO: 54621 - RNA, 21 nt, RNAi
uucuucacggagucuauuaug

SEQ ID NO: 54622 - DNA, 21 bp, homo sapiens
gaggaagaagacaaaccaccg

SEQ ID NO: 54623 - RNA, 21 nt, RNAi
ggaagaagacaaaccaccguu

SEQ ID NO: 54624 - RNA, 21 nt, RNAi
uuccuucuucuguuugguggc

SEQ ID NO: 54625 - DNA, 21 bp, homo sapiens
gaagaagacaaaccaccgcct

SEQ ID NO: 54626 - RNA, 21 nt, RNAi
agaagacaaaccaccgccuuu

SEQ ID NO: 54627 - RNA, 21 nt, RNAi
uuucuucuguuugguggcgga

SEQ ID NO: 54628 - DNA, 21 bp, homo sapiens
gaagacaaaccaccgcctcag

SEQ ID NO: 54629 - RNA, 21 nt, RNAi
agacaaaccaccgccucaguu

SEQ ID NO: 54630 - RNA, 21 nt, RNAi
uuucuguuugguggcggaguc

SEQ ID NO: 54631 - DNA, 21 bp, homo sapiens
gacaaaccaccgcctcagcct

SEQ ID NO: 54632 - RNA, 21 nt, RNAi
caaaccaccgccucagccuuu

SEQ ID NO: 54633 - RNA, 21 nt, RNAi
uuguuugguggcggagucgga

SEQ ID NO: 54634 - DNA, 21 bp, homo sapiens
gagcctcagtgcagccatcca

SEQ ID NO: 54635 - RNA, 21 nt, RNAi
gccucagugcagccauccauu

SEQ ID NO: 54636 - RNA, 21 nt, RNAi
uucggagucacgucgguaggu

SEQ ID NO: 54637 - DNA, 21 bp, homo sapiens
gaggagagccagcggcttatt

SEQ ID NO: 54638 - RNA, 21 nt, RNAi
ggagagccagcggcuuauuuu

SEQ ID NO: 54639 - RNA, 21 nt, RNAi
uuccucucggucgccgaauaa

SEQ ID NO: 54640 - DNA, 21 bp, homo sapiens
gagagccagcggcttattgga

SEQ ID NO: 54641 - RNA, 21 nt, RNAi
gagccagcggcuuauuggauu

SEQ ID NO: 54642 - RNA, 21 nt, RNAi
uucucggucgccgaauaaccu

SEQ ID NO: 54643 - DNA, 21 bp, homo sapiens
gagccagcggcttattggaca

SEQ ID NO: 54644 - RNA, 21 nt, RNAi
gccagcggcuuauuggacauu

SEQ ID NO: 54645 - RNA, 21 nt, RNAi
uucggucgccgaauaaccugu

SEQ ID NO: 54646 - DNA, 21 bp, homo sapiens
gaaagtgaagcattatctcat

SEQ ID NO: 54647 - RNA, 21 nt, RNAi
aagugaagcauuaucucauuu

SEQ ID NO: 54648 - RNA, 21 nt, RNAi
uuuucacuucguaauagagua

SEQ ID NO: 54649 - DNA, 21 bp, homo sapiens
gaagcattatctcatcctgcc

SEQ ID NO: 54650 - RNA, 21 nt, RNAi
agcauuaucucauccugccuu

SEQ ID NO: 54651 - RNA, 21 nt, RNAi
uuucguaauagaguaggacgg

SEQ ID NO: 54652 - DNA, 21 bp, homo sapiens
gagttccaccagctgaaccgc

SEQ ID NO: 54653 - RNA, 21 nt, RNAi
guuccaccagcugaaccgcuu

SEQ ID NO: 54654 - RNA, 21 nt, RNAi
uucaagguggucgacuuggcg

SEQ ID NO: 54655 - DNA, 21 bp, homo sapiens
gaccgagaggccagttgatct

SEQ ID NO: 54656 - RNA, 21 nt, RNAi
ccgagaggccaguugaucuuu

SEQ ID NO: 54657 - RNA, 21 nt, RNAi
uuggcucuccggucaacuaga

SEQ ID NO: 54658 - DNA, 21 bp, homo sapiens
gagaggccagttgatctgctc

SEQ ID NO: 54659 - RNA, 21 nt, RNAi
gaggccaguugaucugcucuu

SEQ ID NO: 54660 - RNA, 21 nt, RNAi
uucuccggucaacuagacgag

SEQ ID NO: 54661 - DNA, 21 bp, homo sapiens
gaggccagttgatctgctctg

SEQ ID NO: 54662 - RNA, 21 nt, RNAi
ggccaguugaucugcucuguu

SEQ ID NO: 54663 - RNA, 21 nt, RNAi
uuccggucaacuagacgagac

SEQ ID NO: 54664 - DNA, 21 bp, homo sapiens
tagacggagccagacttcgga

SEQ ID NO: 54665 - RNA, 21 nt, RNAi
gacggagccagacuucggauu

SEQ ID NO: 54666 - RNA, 21 nt, RNAi
uucugccucggucugaagccu

SEQ ID NO: 54667 - DNA, 21 bp, homo sapiens
tagcagctctccggaagacct

SEQ ID NO: 54668 - RNA, 21 nt, RNAi
gcagcucuccggaagaccuuu

SEQ ID NO: 54669 - RNA, 21 nt, RNAi
uucgucgagaggccuucugga

SEQ ID NO: 54670 - DNA, 21 bp, homo sapiens
tagtaaaggtgtacagtgagg

SEQ ID NO: 54671 - RNA, 21 nt, RNAi
guaaagguguacagugagguu

SEQ ID NO: 54672 - RNA, 21 nt, RNAi
uucauuuccacaugucacucc

SEQ ID NO: 54673 - DNA, 21 bp, homo sapiens
taaaggtgtacagtgaggatg

SEQ ID NO: 54674 - RNA, 21 nt, RNAi
aagguguacagugaggauguu

SEQ ID NO: 54675 - RNA, 21 nt, RNAi
uuuuccacaugucacuccuac

SEQ ID NO: 54676 - DNA, 21 bp, homo sapiens
tagccgcttcgtcttccggaa

SEQ ID NO: 54677 - RNA, 21 nt, RNAi
gccgcuucgucuuccggaauu

SEQ ID NO: 54678 - RNA, 21 nt, RNAi
uucggcgaagcagaaggccuu

SEQ ID NO: 54679 - DNA, 21 bp, homo sapiens
tacgaactgttcaagagctcc

SEQ ID NO: 54680 - RNA, 21 nt, RNAi
cgaacuguucaagagcuccuu

SEQ ID NO: 54681 - RNA, 21 nt, RNAi
uugcuugacaaguucucgagg

SEQ ID NO: 54682 - DNA, 21 bp, homo sapiens
taaggatccgaggcacctgca

SEQ ID NO: 54683 - RNA, 21 nt, RNAi
aggauccgaggcaccugcauu

SEQ ID NO: 54684 - RNA, 21 nt, RNAi
uuuccuaggcuccguggacgu

SEQ ID NO: 54685 - DNA, 21 bp, homo sapiens
tacgtggcagatgtgaacgag

SEQ ID NO: 54686 - RNA, 21 nt, RNAi
cguggcagaugugaacgaguu

SEQ ID NO: 54687 - RNA, 21 nt, RNAi
uugcaccgucuacacuugcuc

SEQ ID NO: 54688 - DNA, 21 bp, homo sapiens
tacaagaattaccagcaggca

SEQ ID NO: 54689 - RNA, 21 nt, RNAi
caagaauuaccagcaggcauu

SEQ ID NO: 54690 - RNA, 21 nt, RNAi
uuguucuuaauggucguccgu

SEQ ID NO: 54691 - DNA, 21 bp, homo sapiens
taccagcaggcacagtctcgc

SEQ ID NO: 54692 - RNA, 21 nt, RNAi
ccagcaggcacagucucgcuu

SEQ ID NO: 54693 - RNA, 21 nt, RNAi
uuggucguccgugucagagcg

SEQ ID NO: 54694 - DNA, 21 bp, homo sapiens
tagacggcctgttcctggtcc

SEQ ID NO: 54695 - RNA, 21 nt, RNAi
gacggccuguuccugguccuu

SEQ ID NO: 54696 - RNA, 21 nt, RNAi
uucugccggacaaggaccagg

SEQ ID NO: 54697 - DNA, 21 bp, homo sapiens
tatctcatcctgccgagcgag

SEQ ID NO: 54698 - RNA, 21 nt, RNAi
ucucauccugccgagcgaguu

SEQ ID NO: 54699 - RNA, 21 nt, RNAi
uuagaguaggacggcucgcuc

SEQ ID NO: 54700 - DNA, 21 bp, homo sapiens
tacttcagcatggatgatggc

SEQ ID NO: 54701 - RNA, 21 nt, RNAi
cuucagcauggaugauggcuu

SEQ ID NO: 54702 - RNA, 21 nt, RNAi
uugaagucguaccuacuaccg

SEQ ID NO: 54703 - DNA, 21 bp, homo sapiens
tagctctggaggtgctgctct

SEQ ID NO: 54704 - RNA, 21 nt, RNAi
gcucuggaggugcugcucuuu

SEQ ID NO: 54705 - RNA, 21 nt, RNAi
uucgagaccuccacgacgaga

SEQ ID NO: 54706 - DNA, 21 bp, homo sapiens
tacagaccgagaggccagttg

SEQ ID NO: 54707 - RNA, 21 nt, RNAi
cagaccgagaggccaguuguu

SEQ ID NO: 54708 - RNA, 21 nt, RNAi
uugucuggcucuccggucaac

SEQ ID NO: 54709 - DNA, 21 bp, homo sapiens
aaacttcgccaagtacgaact

SEQ ID NO: 54710 - RNA, 21 nt, RNAi
acuucgccaaguacgaacuuu

SEQ ID NO: 54711 - RNA, 21 nt, RNAi
uuugaagcgguucaugcuuga

SEQ ID NO: 54712 - DNA, 21 bp, homo sapiens
aacttcgccaagtacgaactg

SEQ ID NO: 54713 - RNA, 21 nt, RNAi
cuucgccaaguacgaacuguu

SEQ ID NO: 54714 - RNA, 21 nt, RNAi
uugaagcgguucaugcuugac

SEQ ID NO: 54715 - DNA, 21 bp, homo sapiens
aagtacgaactgttcaagagc

SEQ ID NO: 54716 - RNA, 21 nt, RNAi
guacgaacuguucaagagcuu

SEQ ID NO: 54717 - RNA, 21 nt, RNAi
uucaugcuugacaaguucucg

SEQ ID NO: 54718 - DNA, 21 bp, homo sapiens
aacaagcttcgaaatggacac

SEQ ID NO: 54719 - RNA, 21 nt, RNAi
caagcuucgaaauggacacuu

SEQ ID NO: 54720 - RNA, 21 nt, RNAi
uuguucgaagcuuuaccugug

SEQ ID NO: 54721 - DNA, 21 bp, homo sapiens
aagcttcgaaatggacacaag

SEQ ID NO: 54722 - RNA, 21 nt, RNAi
gcuucgaaauggacacaaguu

SEQ ID NO: 54723 - RNA, 21 nt, RNAi
uucgaagcuuuaccuguguuc

SEQ ID NO: 54724 - DNA, 21 bp, homo sapiens
aagaattaccagcaggcacag

SEQ ID NO: 54725 - RNA, 21 nt, RNAi
gaauuaccagcaggcacaguu

SEQ ID NO: 54726 - RNA, 21 nt, RNAi
uucuuaauggucguccguguc

SEQ ID NO: 54727 - DNA, 21 bp, homo sapiens
catgtagtaaaggtgtacagt

SEQ ID NO: 54728 - RNA, 21 nt, RNAi
uguaguaaagguguacaguuu

SEQ ID NO: 54729 - RNA, 21 nt, RNAi
uuacaucauuuccacauguca

SEQ ID NO: 54730 - DNA, 21 bp, homo sapiens
caagtacgaactgttcaagag

SEQ ID NO: 54731 - RNA, 21 nt, RNAi
aguacgaacuguucaagaguu

SEQ ID NO: 54732 - RNA, 21 nt, RNAi
uuucaugcuugacaaguucuc

SEQ ID NO: 54733 - DNA, 21 bp, homo sapiens
cagatgtgaacgagtccaacg

SEQ ID NO: 54734 - RNA, 21 nt, RNAi
gaugugaacgaguccaacguu

SEQ ID NO: 54735 - RNA, 21 nt, RNAi
uucuacacuugcucagguugc

SEQ ID NO: 54736 - DNA, 21 bp, homo sapiens
caacaagcttcgaaatggaca

SEQ ID NO: 54737 - RNA, 21 nt, RNAi
acaagcuucgaaauggacauu

SEQ ID NO: 54738 - RNA, 21 nt, RNAi
uuuguucgaagcuuuaccugu

SEQ ID NO: 54739 - DNA, 21 bp, homo sapiens
caagcttcgaaatggacacaa

SEQ ID NO: 54740 - RNA, 21 nt, RNAi
agcuucgaaauggacacaauu

SEQ ID NO: 54741 - RNA, 21 nt, RNAi
uuucgaagcuuuaccuguguu

SEQ ID NO: 54742 - DNA, 21 bp, homo sapiens
gacttcggtttctgtgtcaag

SEQ ID NO: 54743 - RNA, 21 nt, RNAi
cuucgguuucugugucaaguu

SEQ ID NO: 54744 - RNA, 21 nt, RNAi
uugaagccaaagacacaguuc

SEQ ID NO: 54745 - DNA, 21 bp, homo sapiens
tacgaactgttcaagagctcc

SEQ ID NO: 54746 - RNA, 21 nt, RNAi
cgaacuguucaagagcuccuu

SEQ ID NO: 54747 - RNA, 21 nt, RNAi
uugcuugacaaguucucgagg

SEQ ID NO: 54748 - DNA, 21 bp, homo sapiens
aacatggtgcgcaggttcttg

SEQ ID NO: 54749 - RNA, 21 nt, RNAi
cauggugcgcagguucuuguu

SEQ ID NO: 54750 - RNA, 21 nt, RNAi
uuguaccacgcguccaagaac

SEQ ID NO: 54751 - DNA, 21 bp, homo sapiens
aagaccaggtcatgatgatgg

SEQ ID NO: 54752 - RNA, 21 nt, RNAi
gaccaggucaugaugaugguu

SEQ ID NO: 54753 - RNA, 21 nt, RNAi
uucugguccaguacuacuacc

SEQ ID NO: 54754 - DNA, 21 bp, homo sapiens
aaagaaccagagaggctctga

SEQ ID NO: 54755 - RNA, 21 nt, RNAi
agaaccagagaggcucugauu

SEQ ID NO: 54756 - RNA, 21 nt, RNAi
uuucuuggucucuccgagacu

SEQ ID NO: 54757 - DNA, 21 bp, homo sapiens
aagaaccagagaggctctgag

SEQ ID NO: 54758 - RNA, 21 nt, RNAi
gaaccagagaggcucugaguu

SEQ ID NO: 54759 - RNA, 21 nt, RNAi
uucuuggucucuccgagacuc

SEQ ID NO: 54760 - DNA, 21 bp, homo sapiens
aaccagagaggctctgagaaa

SEQ ID NO: 54761 - RNA, 21 nt, RNAi
ccagagaggcucugagaaauu

SEQ ID NO: 54762 - RNA, 21 nt, RNAi
uuggucucuccgagacucuuu

SEQ ID NO: 54763 - DNA, 21 bp, homo sapiens
aaacttagatcatcagtcacc

SEQ ID NO: 54764 - RNA, 21 nt, RNAi
acuuagaucaucagucaccuu

SEQ ID NO: 54765 - RNA, 21 nt, RNAi
uuugaaucuaguagucagugg

SEQ ID NO: 54766 - DNA, 21 bp, homo sapiens
aacttagatcatcagtcaccg

SEQ ID NO: 54767 - RNA, 21 nt, RNAi
cuuagaucaucagucaccguu

SEQ ID NO: 54768 - RNA, 21 nt, RNAi
uugaaucuaguagucaguggc

SEQ ID NO: 54769 - DNA, 21 bp, homo sapiens
aagctgtcgacttcatgacaa

SEQ ID NO: 54770 - RNA, 21 nt, RNAi
gcugucgacuucaugacaauu

SEQ ID NO: 54771 - RNA, 21 nt, RNAi
uucgacagcugaaguacuguu

SEQ ID NO: 54772 - DNA, 21 bp, homo sapiens
aaatggcagaaccaaagctca

SEQ ID NO: 54773 - RNA, 21 nt, RNAi
auggcagaaccaaagcucauu

SEQ ID NO: 54774 - RNA, 21 nt, RNAi
uuuaccgucuugguuucgagu

SEQ ID NO: 54775 - DNA, 21 bp, homo sapiens
aatggcagaaccaaagctcaa

SEQ ID NO: 54776 - RNA, 21 nt, RNAi
uggcagaaccaaagcucaauu

SEQ ID NO: 54777 - RNA, 21 nt, RNAi
uuaccgucuugguuucgaguu

SEQ ID NO: 54778 - DNA, 21 bp, homo sapiens
catggtgcgcaggttcttggt

SEQ ID NO: 54779 - RNA, 21 nt, RNAi
uggugcgcagguucuugguuu

SEQ ID NO: 54780 - RNA, 21 nt, RNAi
uuaccacgcguccaagaacca

SEQ ID NO: 54781 - DNA, 21 bp, homo sapiens
cagcagccgcttcctagaaga

SEQ ID NO: 54782 - RNA, 21 nt, RNAi
gcagccgcuuccuagaagauu

SEQ ID NO: 54783 - RNA, 21 nt, RNAi
uucgucggcgaaggaucuucu

SEQ ID NO: 54784 - DNA, 21 bp, homo sapiens
cagccgcttcctagaagacca

SEQ ID NO: 54785 - RNA, 21 nt, RNAi
gccgcuuccuagaagaccauu

SEQ ID NO: 54786 - RNA, 21 nt, RNAi
uucggcgaaggaucuucuggu

SEQ ID NO: 54787 - DNA, 21 bp, homo sapiens
catcgcgatgtcgcacggtac

SEQ ID NO: 54788 - RNA, 21 nt, RNAi
ucgcgaugucgcacgguacuu

SEQ ID NO: 54789 - RNA, 21 nt, RNAi
uuagcgcuacagcgugccaug

SEQ ID NO: 54790 - DNA, 21 bp, homo sapiens
caccagaggcagtaaccatgc

SEQ ID NO: 54791 - RNA, 21 nt, RNAi
ccagaggcaguaaccaugcuu

SEQ ID NO: 54792 - RNA, 21 nt, RNAi
uuggucuccgucauugguacg

SEQ ID NO: 54793 - DNA, 21 bp, homo sapiens
cagagaggctctgagaaacct

SEQ ID NO: 54794 - RNA, 21 nt, RNAi
gagaggcucugagaaaccuuu

SEQ ID NO: 54795 - RNA, 21 nt, RNAi
uucucuccgagacucuuugga

SEQ ID NO: 54796 - DNA, 21 bp, homo sapiens
catcagtcaccgaaggtccta

SEQ ID NO: 54797 - RNA, 21 nt, RNAi
ucagucaccgaagguccuauu

SEQ ID NO: 54798 - RNA, 21 nt, RNAi
uuagucaguggcuuccaggau

SEQ ID NO: 54799 - DNA, 21 bp, homo sapiens
cagtcaccgaaggtcctacag

SEQ ID NO: 54800 - RNA, 21 nt, RNAi
gucaccgaagguccuacaguu

SEQ ID NO: 54801 - RNA, 21 nt, RNAi
uucaguggcuuccaggauguc

SEQ ID NO: 54802 - DNA, 21 bp, homo sapiens
cactaccgtaaatgtccattt

SEQ ID NO: 54803 - RNA, 21 nt, RNAi
cuaccguaaauguccauuuuu

SEQ ID NO: 54804 - RNA, 21 nt, RNAi
uugauggcauuuacagguaaa

SEQ ID NO: 54805 - DNA, 21 bp, homo sapiens
catttcttgcgagcctcgcag

SEQ ID NO: 54806 - RNA, 21 nt, RNAi
uuucuugcgagccucgcaguu

SEQ ID NO: 54807 - RNA, 21 nt, RNAi
uuaaagaacgcucggagcguc

SEQ ID NO: 54808 - DNA, 21 bp, homo sapiens
cacactgctagcaaatggcag

SEQ ID NO: 54809 - RNA, 21 nt, RNAi
cacugcuagcaaauggcaguu

SEQ ID NO: 54810 - RNA, 21 nt, RNAi
uugugacgaucguuuaccguc

SEQ ID NO: 54811 - DNA, 21 bp, homo sapiens
cactgctagcaaatggcagaa

SEQ ID NO: 54812 - RNA, 21 nt, RNAi
cugcuagcaaauggcagaauu

SEQ ID NO: 54813 - RNA, 21 nt, RNAi
uugacgaucguuuaccgucuu

SEQ ID NO: 54814 - DNA, 21 bp, homo sapiens
caaatggcagaaccaaagctc

SEQ ID NO: 54815 - RNA, 21 nt, RNAi
aauggcagaaccaaagcucuu

SEQ ID NO: 54816 - RNA, 21 nt, RNAi
uuuuaccgucuugguuucgag

SEQ ID NO: 54817 - DNA, 21 bp, homo sapiens
cagaaccaaagctcaaataaa

SEQ ID NO: 54818 - RNA, 21 nt, RNAi
gaaccaaagcucaaauaaauu

SEQ ID NO: 54819 - RNA, 21 nt, RNAi
uucuugguuucgaguuuauuu

SEQ ID NO: 54820 - DNA, 21 bp, homo sapiens
gagaacatggtgcgcaggttc

SEQ ID NO: 54821 - RNA, 21 nt, RNAi
gaacauggugcgcagguucuu

SEQ ID NO: 54822 - RNA, 21 nt, RNAi
uucuuguaccacgcguccaag

SEQ ID NO: 54823 - DNA, 21 bp, homo sapiens
gaacatggtgcgcaggttctt

SEQ ID NO: 54824 - RNA, 21 nt, RNAi
acauggugcgcagguucuuuu

SEQ ID NO: 54825 - RNA, 21 nt, RNAi
uuuguaccacgcguccaagaa

SEQ ID NO: 54826 - DNA, 21 bp, homo sapiens
gatgctactgaggagccagcg

SEQ ID NO: 54827 - RNA, 21 nt, RNAi
ugcuacugaggagccagcguu

SEQ ID NO: 54828 - RNA, 21 nt, RNAi
uuacgaugacuccucggucgc

SEQ ID NO: 54829 - DNA, 21 bp, homo sapiens
gaagaccaggtcatgatgatg

SEQ ID NO: 54830 - RNA, 21 nt, RNAi
agaccaggucaugaugauguu

SEQ ID NO: 54831 - RNA, 21 nt, RNAi
uuucugguccaguacuacuac

SEQ ID NO: 54832 - DNA, 21 bp, homo sapiens
gattgaaagaaccagagaggc

SEQ ID NO: 54833 - RNA, 21 nt, RNAi
uugaaagaaccagagaggcuu

SEQ ID NO: 54834 - RNA, 21 nt, RNAi
uuaacuuucuuggucucuccg

SEQ ID NO: 54835 - DNA, 21 bp, homo sapiens
gaaagaaccagagaggctctg

SEQ ID NO: 54836 - RNA, 21 nt, RNAi
aagaaccagagaggcucuguu

SEQ ID NO: 54837 - RNA, 21 nt, RNAi
uuuucuuggucucuccgagac

SEQ ID NO: 54838 - DNA, 21 bp, homo sapiens
gaaccagagaggctctgagaa

SEQ ID NO: 54839 - RNA, 21 nt, RNAi
accagagaggcucugagaauu

SEQ ID NO: 54840 - RNA, 21 nt, RNAi
uuuggucucuccgagacucuu

SEQ ID NO: 54841 - DNA, 21 bp, homo sapiens
gagaggctctgagaaacctcg

SEQ ID NO: 54842 - RNA, 21 nt, RNAi
gaggcucugagaaaccucguu

SEQ ID NO: 54843 - RNA, 21 nt, RNAi
uucuccgagacucuuuggagc

SEQ ID NO: 54844 - DNA, 21 bp, homo sapiens
gaaacttagatcatcagtcac

SEQ ID NO: 54845 - RNA, 21 nt, RNAi
aacuuagaucaucagucacuu

SEQ ID NO: 54846 - RNA, 21 nt, RNAi
uuuugaaucuaguagucagug

SEQ ID NO: 54847 - DNA, 21 bp, homo sapiens
gatcatcagtcaccgaaggtc

SEQ ID NO: 54848 - RNA, 21 nt, RNAi
ucaucagucaccgaaggucuu

SEQ ID NO: 54849 - RNA, 21 nt, RNAi
uuaguagucaguggcuuccag

SEQ ID NO: 54850 - DNA, 21 bp, homo sapiens
gaagctgtcgacttcatgaca

SEQ ID NO: 54851 - RNA, 21 nt, RNAi
agcugucgacuucaugacauu

SEQ ID NO: 54852 - RNA, 21 nt, RNAi
uuucgacagcugaaguacugu

SEQ ID NO: 54853 - DNA, 21 bp, homo sapiens
gagtcacactgctagcaaatg

SEQ ID NO: 54854 - RNA, 21 nt, RNAi
gucacacugcuagcaaauguu

SEQ ID NO: 54855 - RNA, 21 nt, RNAi
uucagugugacgaucguuuac

SEQ ID NO: 54856 - DNA, 21 bp, homo sapiens
tactgaggagccagcgtctag

SEQ ID NO: 54857 - RNA, 21 nt, RNAi
cugaggagccagcgucuaguu

SEQ ID NO: 54858 - RNA, 21 nt, RNAi
uugacuccucggucgcagauc

SEQ ID NO: 54859 - DNA, 21 bp, homo sapiens
tagaagaccaggtcatgatga

SEQ ID NO: 54860 - RNA, 21 nt, RNAi
gaagaccaggucaugaugauu

SEQ ID NO: 54861 - RNA, 21 nt, RNAi
uucuucugguccaguacuacu

SEQ ID NO: 54862 - DNA, 21 bp, homo sapiens
tagatcatcagtcaccgaagg

SEQ ID NO: 54863 - RNA, 21 nt, RNAi
gaucaucagucaccgaagguu

SEQ ID NO: 54864 - RNA, 21 nt, RNAi
uucuaguagucaguggcuucc

SEQ ID NO: 54865 - DNA, 21 bp, homo sapiens
taacgtagatataagccttcc

SEQ ID NO: 54866 - RNA, 21 nt, RNAi
acguagauauaagccuuccuu

SEQ ID NO: 54867 - RNA, 21 nt, RNAi
uuugcaucuauauucggaagg

SEQ ID NO: 54868 - DNA, 21 bp, homo sapiens
tactggcttctcttgagtcac

SEQ ID NO: 54869 - RNA, 21 nt, RNAi
cuggcuucucuugagucacuu

SEQ ID NO: 54870 - RNA, 21 nt, RNAi
uugaccgaagagaacucagug

SEQ ID NO: 54871 - DNA, 21 bp, homo sapiens
tagcaaatggcagaaccaaag

SEQ ID NO: 54872 - RNA, 21 nt, RNAi
gcaaauggcagaaccaaaguu

SEQ ID NO: 54873 - RNA, 21 nt, RNAi
uucguuuaccgucuugguuuc
